United States Patent Application Publication US 2022/0008368 A1 - sequence listing, part 19

SEQ ID NO: 2 - DNA, 58617616 bp, Homo sapiens (residues 39,078,415-41,249,437 of 58,617,616)
  modified_base (1)..(60000): a, c, t, g, unknown or other
  modified_base (24448981)..(24498980): a, c, t, g, unknown or other
  modified_base (24552653)..(24552752): a, c, t, g, unknown or other
  modified_base (24891257)..(24891356): a, c, t, g, unknown or other
  modified_base (24895791)..(24895890): a, c, t, g, unknown or other
  modified_base (24898314)..(24904771): a, c, t, g, unknown or other
  modified_base (24908590)..(24908689): a, c, t, g, unknown or other
  modified_base (27190875)..(27240874): a, c, t, g, unknown or other
  modified_base (58607617)..(58617616): a, c, t, g, unknown or other
tataacaagtgctgtttttaccacaggtcttagttcattacatccattcattcactcatctaattctcacaactctctaaaatacgtcaaatatacagcatggtttattatccccattttgcagatgtggaaattgaggcacagagaggcaaatggctcacagctactcaatgctggagctgggtttaaacgcaagctgtctgtctccaaagccctggcttttttccatggatggcatctctcagattgggtaaagtaaaccacacaatggaatattatgagccagtatcaaagaatgcttagaagagtccagtaaaaataacgtcagactgtggtatgaccgtgattcagcccaattcctgtgtacaagaaaaaatgctccaagcattctcaatggccactgagtgattgaatgaaatcttttgtaaataattgtggctattatctatggagctctttcttgatcagccccaccccgtgttacacgttttacttgctgtatctttccaagcatttgcaaagtaggcactgttgtatcagttttagatattaggtcactgaggctaacacaagagcagacactcacccaaggttacccagtcacaaagtggcagaaccagaattcaaacccaggtttgtggctatgcacagtgactcacgcctataatcccagcattttgggaggctgaggtgggaggattgcttgaggacaggagtttgaggtcacagtgagctatgattgcatgattacaccaatgcactccagcctgggtgacagagtgagaccctgtctccaaaaacaaaaacaaaacccaggtttgttagttccttgagccatgaaacctccctggctctttctaagttttcagtaatgagatgtgaatattttcttttttctttttattttttgagacggagtctgactctgtcgcccaggctggagtgcaatagtgtgatctcagctcactgcaatctccgcctcccgggttcaagcgattctcctgcctcagcctcctgagtagctaggattacaggcgctcactaccatgcctggcaaatttttgtatttttggtagagatggggtttcaccacgttggccaggctggtctcgaactcctgcccccgtgatctgcccaccttggcctcccaaagtgctgggattacaggctggccaatgatgctactattttcataatggagaaatagtttttaaagaagtctccttaagaaagtagactcatttatttttattttattagctatgtgcattactttgataaaatttaaaaccctaacttacaccgtacacaaaaatcagttccagatagattgccaacctaagggtaactcacatgagaaagctattggaaaataacagaagaggccagatgcggtggctcactcctgtaatgccaacagtttgggaggtcaaagcaggaggatcacttgagtccaggagttcaagaccagcctggggaatatggcaagaccttgtccctacaaaaaaattaacaaaattagctgggcgtggtgcacgcacctgtaatcccagcactttgggaggtcgaggcgggtggatcacctgaggtcaggggttcgagaccagcctggccaacatggtgaaacccccgtctctgcctaaaatacaaaaattagccgggcatggtggcaggcgcctgtaatcacagctactcgggaggctgaggcagaatagcctgaacccgggaggcagaggttgcagtgagccgagatcatgccattgcactccagcctgggcaacagagtgagactctgtctcaaataaataaataaataaaaatagaaataaacaaaattagccaggcatggtggtggtgcatgcctgtggtcccagctactgggaggctgaggtgggaggattgcttgagccagggaggtagaggctgcagtgagctatgatgccactgcactacagcctaggtgacagagcaagaccctttatctaaaaaataaaataaaataaaaataaataaaccaataaaaatggacaacccagtagaaaaccggacaagacacttgaacaagcacatcacaaaaaggatatccaaaaggctgatatgcaaatgaagagatgttcaatttcattactcagcagggaaatgcaaattaaagctacaatgagctacctctacacacccaccagaatgactaaaaataaagcacctgacaatgctttattggttccaagtgttggcagcgatgtggaacaatggaagtgttctaacgtggctggtgggaggagaagaaataccactttggaaacctctttggctgtatctaccaaagataaagatacatgcaccttatgacccagccatcttatacttctagtttacatccaagagaaatgtgtatatatgtttaacaaaatatgtactagaatgttgatcacagcactatttgcaaaagccgaaaaaaaaggaagtaactcaaaattccattgacaattggttttgatagataaaccaactgataaataaattgataaataaaccactgatggctgggcacggtggctcacgcctgtaatcccagcactttgggaggctgaggcaggcggatcacctgaggtcgggagttcgaaatcagcctggccaacatggtgaaaccttatctctactaaaaaatacaaaattagctaggtgtggtggtgcatgcctgtgatcccagctactcaggaggctgaggcaggagaatcgcttgaacctgggaggcggaggttgcagtgagccaagatcaccccattgcactccagcctgggcaacaagaacgaaactccgtctcaaaagaacaaaacaaaaacaaaaacaaacaaacaaaaaaccaccagtgatacataaattggggtgtattcacacagtggagggctgcttggcaatgagaaagaaaatgggttgcaattatgcgcccaactcagatacatttcccaatcataaagttgagtgaaagagttaaacctgtatatttctatttacgccatgtgcaaaaataggcaaaatgaaaccactgtgtgtagggaggtgtacttaggtggggaaaccaaagtcaggtaaaagttaagtggatttcttcatgggaaggaagaaagctgtgctggagaggaagcaggagggggcttgggggaaggcgataagattatttttcttgcacccggttggtggttacacagttgtgttcactttgtcatatttattcagtgggacatttatgtctcattacttttctgcatgtatatcacatttcataatttaaaaggtttaaattgactgggcacagcagctcacacctgtaatcccggcactttgggaggccgaggtgggcagatcacttgagtctaggagttcgagaccagcctggccaacacagtgaaaccccgtctctactaaaaatacaaggccgggcgcggtggctcacgcctgcagtcccagcactttgggaggccgaggcgggcggatcacgccgtcagaagatcaagaccatcctggctaacaaggtgaaaccctgtctctactaaaaatacaaaaaattagctgggtgtggcggcacgtgcctgtagtcccagctacttgggaggctgaggcaggagaatggctagaacccgggaggtggagtttgcggtgagccgagatcacaccactgcactccagcctgggggacagagtaaagtgacttagaaaactaggcttattaaaactctgccttacaaactgggcagactagatgtcttggtaataattagaagattattatcaataatcttctaattattataatgataattagaagattatacgggggcacttgctctgtgctaggcactgttctaaggggtttattatttaatccttgcaacaaccctataaggtgctactattgttcccatttcacagatggggaaaccgaggcaccgtgcggttaaatcacttgtctaagttagtcagtgctgaagatagatttataaccaggccatctagccccagagtcgatgctccattccccaccgcaagcttatacctgagctataagccctcatccgccagtcagggtccaaccagaggcaactccagtgggctcttttcacctgggctggtggttgggaattcaggagctacgtgaacttggataggggaaactttttttacctctccttttactacactttaatctagcagttctcaaaatgtggtctgggggcacctgtgggtccgcaagacctttctcaggggctagtgaggtcaaaagtattttcataatgatattaagacgtttgtccttttcattctccagagactacctgacctgtgataatgtcatcactctgatggctaatagaaatatatgcatgtatattcgtgtgtttttaaaacttctcgttttcagccaggttcatgcctgtagtcccagctactcgggaggctgaggctcgaaaatcgcatgaacccaggaggcagaggttgtaatgagccaagatcgtgttactgtgctccagcctgggcaacagagtgaaactctgtctcaaaacaaaaacaaaacacacacacacacaaaaccaaaaaacaaacacaaaaacaaaacaacaacaacaaaaaaaccccccaacaccttgtatcacaatagcactggtttcctttgtatttctgtgtatttatattatgcatgtaacgacatgatcctgagaagggcttgaccagcttgccataggcatctttagcacaaaaaagcttaggaacctcccattctggacgaactaagaatacggggaggttataattgggggccacaggagtggcaggtactcaagtttggttatgagagctactttcattatattttaggctgtaatggagactctggaagtgggaagaaaaaaaaaaaaactcaaacagtgcaaagggctcgttttgattttcccacactcctagtgccaatttctgaaattggtgtccacaatcagtagaagcctatgtgctctgaatttacaaagccaagtggtggcgggtcattgtatctgcagtcaggaaggggaaacgactggaaatccgggcccccccagttcttccctgcttctctttttgtggcagccgctcctcacgttcaaacagattgcaaaggtttacaggggagaaccctaacttgttccctagacgtcagtttctggagttcctgcattaatacgattaaaaagaacagctgattcttatccagcccttactctgggccgggccctgttatcggcatgaaatttcatgcagcaactcgtttactcctcacaacagcccacggggtatatacgagcatcacctcctttttacaggtgaaaaaacccaaggtccagcgaggttgaataactcacctaggtcgcacagctcagaaagcccactgcaattccgggattctggttttgttttgaggttgccccgggcttctgaggaggggtcagtgggctcagcatggaaaggaaggaagccggaaggctggaggaagatgcagcgaggctggaaaggttggggatcccccggtcctgcacacctgggtacctggggatcgggcagggccaggataggggccggtgtccgtgccctggggctccccagctgatgagtgggcgcctgagggacgagcgcagggttacctgcctgggctctcacctggtggccggctcagaggtggcgcgccggagacgtatcataaccttcctgggtcccccttcccgcgccacgccctggtggggtgggcgggtgggtgtggggcgcccaggcaggaccggccggacctgtgggacccggggccctggctgtctagggaggctgtcaccccgaggcgaccggctcttccggggctgggacggctgtaggcggcaagaggcctcggcacccgcgaactcataaataccggggcggcgctggtggcgggagaggcgcgtgcgggcagccggcgcccccgagggtgagccggggtccgggagggcgtcccctttcccggatggtcccgacccggctccatcctggcagctggagacggagctggagcaggcgggaaagcgctggagagaaggggggtgggtacagatgggggaagggcagggacgctggggatggggagagaggatgcggccgctctggccatgatgggctctaaaggatctgggggtggtgtgggaggattggggtcactaggagcaaaatagaaggctaaggatggagtagggaggcgaggtcccgggggcaggcgggaatgcttggaatctcgggagtaggtaggagaactggggtttctaacagcaggatggaaagctggggatggggctgcggaatgcaacctcctacacagcctccaccccgctcccagacccccagcactgagagtgagctctggttaggagcaaggctctggaatcaggccctcctgggttcaaatcctggctccatcccatcctagctgtgcagctgaatcactcagctgctcggtttcctcatctgtgatatggggatgacaatgctcacagccaccacttcatagcaatgtcgtgaggcttccgtgaattaatctatgtcaagcggttggcacactgtgagtgaggctcagagagctctgctgctgttccttagcgattcttatttttggtttctctctccagcacctggataaccacccatcttgaaggagacctccctgccctgcctctgttgtcccccagagcactgcctgatcatcctctgttccccatcctcccagcccttcctgctgtacctgtggggagctgatctcctcagtccccctgcttttccccggtctgccatcaccaccccaccaccatgcacccccttcctggctactggtcctgttactgtctactcctgctattctccttgggagtccaggggtccctgggggctcccagcgctgccccagagcaagtccatctgtcttacccaggtaagtgtccctgactcatttctatgcctctaccagagaggcccagcggtgcttcgttgtttgagggctcaggaatcccacactgtgagcccctaggcgggtggctcattcctcctgagcctccatcatccacctctgtggaataggaagtacaggctgtggaacacctggaagtgtggggaatgatcatggtgctcagcccacagagagtgctcccctgctctcaaaaggggaccgctgctgtccttgttcattgcatctctgttgtgtttccgggacctggcacgtttgttcgttcatgcacggtaggcctcagagccagttgtggaaggaaccagtggatgaatgataacagagctgggttacccagccccttctccatccctcttctcctcttccccacgaggctgactgcctcccgatctttgattaggatccttccactgtgggagtaagagcttggactctggaccattggcacccagaccacgtgggttagaatcccagctttgctatgtacctgctgcctaatcttgggcaagtggcttaacctctctgtcctcagtctcctcatctggataatggggtaatattagtacaacctcatggtgaggtgtaaatgagttgctacctgtaaaggggcagaactgaggctgagtgtgggggctcacacctgtagtcttagcagtttgggaggctgaggcggaaggatcacttgagctcatgagtttgggaccagcctaggaaacatagtgagacctctgcctcttagggaaaaagaaaaaatcttagacaggtgtggtggcatgcacctatagtcccagctacttgggagactgaggtgggaggatcgcttgagcccaggagttcaaggctgcagtgagccatgattggccactacactccagcctgggcaacagagagagaccctgtctttaaaaaaaaaaatgtggaggaggccaggcacagtggtgcatgcctgtaatctcagcaatttgggacactgaggtgggtggatcacttgacctcaggggttcaagaccagcctgggtaacatgggtgaaacccggtctctacaaaaaaattaaaaaattagctgggcatggtggctcacgcctggtctcagctgcttggggagctgaggcaagaggatcgcttgagcccaggaggcaaaggttgcaatgagccaagatcatgccattacactccaacctggctgacagaatgaggccctgtctcaaaaaaaaaaaaggggggggggagggggatagaacggagcttggcatgtagcagcaatttccatacactttaaatctcaggactgtttgttttaaactgttaatctcaggaccattttacatcactaaattttatggagaactaaaatttatggagaagttcaaagagctttagtttatgtgcattacagctagcaatatttactaaataaggtattaaaactgaggcatttaaaattttttattgtcatttaaaattaacaataacaaacaccttcagtattaatgtatatgatatttttaaggaacaaactgtattttgcaaaagaagaaattgagtgaggaaagtggcattgacttgcatcttttaaaaatcttttatttatttatttatttttgagacagggtctcgctctgtcaaccaggctggagtgcagtggcacagtcttggctcactgcagcctctgccccgcagggttcaagtgattctcccacctcagcctcccgagtagctgggattacaggcacccaccaccccatacttggctaatttttgtattttttatacagatggaatttcaccatgttgcccaggctggtcttgaattcctaagctcaagcgatcctccagtctcggcctcccaaagtgctgggattacagacatgagccaccgcgccccgcctaaaatctctttagtatctggtttggtaactgacaactggattctcctcagatctgttttcattttagtctgttgtgatttgttgttttggattttgcctgtgaagaaaatctgttcttgcacagacatgtggttgaaacagggagaaaagttgcttgttttttgacacagggtttggctctgtcagggtttggcactggagtgcagtagcacaaacatggctcactgcaacctcaactccgagactcaagcgatcctcccacctcagtctcttgaatagctgggaccacaggggcatgacaccatgcccagctaattttgtttttttttttttttttttgagatggagcctcactctgttggccaggctgtagtgcaatggcatgatcttggctcactgcaagctccacctcctggtttcaagcgattctcctgcttcagcctcccaagtatctgggattacaggcatgcaccaccacacctggctaatttttgtatttttagtagagacggggtttcaccatgttggccaggctggcctcgaactcctgacctcaagtgatccacccacctctgcctcccaaaatgctgggattacaggcgtgagccaccgtgcctggctctagtcctactcttttctatctgtgccagttcctcagtcattccttatctttccttgtttttcatgtcttttacatcttcaaagaagatagtttcttctttttttttagatagggtctcactctgtcacccacgctggaatgcaatggcgcaatcatagcttactgcagcctctaacttctgggcacaagtgatcctcctgactcagcctcctgagtagctgggactacagacgtgcactaccatgcctggctaattctttttattttttgtagagacaaggtctcactatgttgtccaggctggtctcaaactcctgggctcaagtgatcctcccacctcagcaccccaaagtgctgggatgacaggggtgagccaccatgcccagcagagagagggtttcttaaaggttagttgcaatgtggaatcagaaaccacatgaatgaactggcttggcatttgccagcctagtgaccttggacaaagcgctttgcctggaggcctctgtaaaaatgggaaaggcagtaaaaacccatctcgtagtgctgctgtgacaatccagtgagatcatggctgtcctttttcagcctacacagtaacaatggcaaatacactcttataagtgctttagacggataactcatttaacctggtatcaaccttaagctgtaggtaccattgctactcccatttgacaagagagactcacagcaggggaagagtctgaccccagttcacacagcctgggaatctgaatgccggcaggctagctcagaagcccacgatctttgtgggtttgtttgtttgtttgtttgtttgtttgtttgttttgagacagagtctcactccgtcgcccaggctggagtgcagtggtgtggtcttggttcactgcaacctctgcctctcaggttcaagggattctcctgcctcagcctcccgagtagctgggactaccagcgcgcatcaccatgcctggctgatttttgtatttgtatttttgcatttttttttttttgagtcgtagtctcactctgttgcccaggctagagtgtagtggtgagatcttggctcactgcaacctctgcctcccaggttcaagcgattctcctgcctcagtctctcaagtagcttggactacaggtgcatgccaccacacccagctaatttttgtattttagtagggacggggtttcaccgtgttgcccaggctggtctcgaactcctgacctcaagtaatctacccacctcggcctcccaaagtgctgggattacaggcatgagccactgtacccggcccctaatttttgtatttttcagtagagatggggtttcaccatgttgggcaggttgatcttgaactcctggcctcaagtgatccacccgcctcggcctcccaaactgctgggattacaggtgtgagccaccatgcccggcctattttaaaacttttaaattttgtactacttttggatttagcagaaacattccaaaaatattacagagttcctgtctcccctcactcagtttcccctgatgttaacattttacgtaaccatgaacaatgattaaaactgagaaatcaagattggtacaatcctgttaactaaactacagatctcatttgaatttcacccgtttttctactaatgtccatttccccttccagaatccgatccaggatctcacattgcatttagctgttgtgcctccctagtctcctcccatctattagtttctcagtcttcccttgtctttcatgctcttggtattgccgagtaccgatcagctattttgtacagtatctctcgtttgggatttgtctgatactttctcaccactggaattaagttatgtatttttggcaagactatcatagatatgatgttgtgcccttcttggcgcatgatacgaagaatcaagatgtggctgtgacttattgctgtgacttattgatgttgaccctgattgtttcattaaggaggtgcctgctgggtttctccactataaagtaattattcttccctttgtagttaataaatatcttgagggagatggctcaagacaatgcaaatcccatttctcctcaatgtttgctcactaattttagcatcttgttaaaagatcctgctgataagtggatcttatcggcaacaattagtgtggtatttgcctaatggtgattttctaattttctaatgccctccttctttttttttctttttaaattttataacctttgttttgttttgtttttgagacggagtcttgctctgttgcccaagctggagtgcagtggcgcaatctcggctcactggaacctccacctcccaggttcaagcaattcttctgcctcagcctcctgagtagcggggattacaggcgcacgctgccatgcctggccaagtttttgtaatttagtagagacggggtttcactgtgttgcccaggctggtcttgaattcctgagctcaggcaatctgcctgcctcatcctcccaaagtgctaggattacaggcatgagccactgtgcccggccaataacttttaattaattaattaattaattttgagacagagtcttgctctgtcacccaggctggattgcagtggcgcgatctcagctcattgcaacccctacctcccgggctcaagtgaccctcatcacttctgcctcttgagtagctgggactacagggatgcaccactatgcctggcaatttttgtatttttgtagagacagagtttcaccatgttgcccaggctggtctggaactcctgggctcaagcaatccacctgcctcagcctcccaaagtgttgggattatagatgtgaactactcgcccagccttcccacttctttttttttttttttttggtctattgttcctattcaatatagtagctccttccatctaattgaaattttattataagaaagagctgtccctccctgctccctttattactttattcaatgatttatttacatcatggactcatggatatccattttattccatgggtgaaaaatctgatgttatgattgtcccagatttggtctctcagaattccttcagattgcgttctgtgttcttacaacaagcctccatcatttgtgagcacttcctcacttgatgacatcacaaatgattccaggctcctcttgtgtatttcctgttccatcctgggaagcacctatttcccacaataagttccagtttcttttctttctttttttttttttttgagatggaattttgctcttgtcacccaggctggagtacagtggcgtgatctcagctcacagcaacctccgcctcctgggttcaagcgattctcctgcctcagcctcccaagtagctgggactacaggcgtgcaccaccaagcccagctgatttttgtatttttagtagagacggggtttcaccatgccggtcaggctggtctcgaactcctgacctcatgatctgcctgcctcagcctcccaaagtgctgggattacaggcatgagccactgtgcccagccctccagttcctttttattggagtatttagaaactaagatctgggcactaggtgtgctcattgccactgggatgtcattgcttctagttcctctcaacaaacacagcgaggcaatacatgcatgtacacgaagctgcatattcacacatctatgtttgaatctgtataaaaattaattacctggttggccacagtggctcagcactttgggaggctgaggtgggtggatcacttgaggtcaggagttcaagaccagcctggccaacatagtgaaaccccatctctaccaaaactacaaaaaattagccaggcgtggtggtgtgtgcctgtaatcccagctactcaggaggctggggcaggagaatcacttgaacctgggaggcggaggttgcagtgaaccaagatcacaccactgtccctccagcctgggtaacagagcaagacaacaactaaaaaaataaaaaaataaaaaaattgaattaccatgagatcatactgatatccctgatttcagcccagcaccatgggtttattttagccttatctttccttatttgtaacttctttctctaacactcagaaacttcactctgtctacgatatatttatttgtttaatcctagtgtatacataaagcatgcggtggctcacacctgtaatctcagcactttgggaggcagaggcaggtggatcacctgaggtcaggagttcaagaccagcttggccaacatggtaaaacccggtctctactaaaaatacaaaaaattagccatgtgtgttggcagatgcctgtaatcccagctactttggaggctgaggcagaagaatcgcttcaacccgggaggcagaggttgcagtgagccgaaattgtgctattgcactccagccttggcaacaagtgcgaaactctgtatatatatatatatatatatatagcagttgcagaatcatttacaggtgtgcctgtgggaagcacacgatgccaaggtgacagcctttatgcacagtcctttttgtcttttgtcttgtaataatacccagttaggacactgtttcttgcggttattattcttcctcacccccttccatgtggttatgttatgcttttttttaatctggttaggtccacttattagtgtttctattccatattgggttccccccacaccctgatagttttaattatttattttgtgggtgtgtgagggaaatgtgaaacatgactatagttccaggagtcaaaattatacgaaaagcctgactcagaccagtgtctctgtttcttcatccctactactctttcccattcctcttttttttttttttttttttttttgagatggagtctcgctctgtcacccaggctggagtgctgtggtgtgatctcggctcactgcaaccttcgcctcccagattcaagcgattctcctgtctcagcctcctgagtagctgggactacaggtgtgtgccactacacccagctaatttttgtagttttggtagagatggggtttcactatgttggccaggttggtcttgaacttctgacctcaggtgatccacctgccttggcctcccaaagtgctgggattacaggcgtgagccaccgcgcctggcccccgtttctttcttttctttctttttttctttttctttctttctttctttccttcttccctcactcctttctttctttctctttctttctttctctccttccttccttccttctttctttgtttctttctttctctccctctctctctctttctctctctctctctttctttctttctctttctttttttcgagacggggtcttgctctgtcacccaggctggagtgcagtgagtggcacaatctcagctcactgcaacctccgcctcctgggttcaagtgattctcctgcctcagcctcctgagtagctggattacaggcacgcgccaccctgcccagctaatttttatagttttagtagagaccgggttttgccatatgggccaggctggtctcgaactcctgacctcaagtgacccaccttcctgagcctcccaaagtgctgggattgcaggcatgagccatcgcgcccagctaatttttgcatttttagtagagatggggtttcaccatgttggccaggctggtctcaaactcctggcctcaaagtgatctacccaccttggcctcccaaagtgctgggattacaggctgagccaccatgtctggcctcctcttttcttctacctcattttccactcatcccctgtaagtaattcatctctttagtacctggtgtaccctttctttatttcttttgtacaaatgaacagagacacctgcatattttctatacccccttacattaagggcagctaactatactcttatgcactttgctttttttggtttaacaatatgtcctggaaacatttcatagcagttcttggaacttgtcctcattcttttttacaccattgtgtggatgttattgagtcactctcctaaatatgggcatttaggttgtttcccgtattttgcaattacaaagagtactgccataaataaccctgagcacatgcatttttgtatggctggaggaagaactcttaacattacactacaccacacggtatttttaaaaccttgacttgggtgctaacgtttaagaatttgaagctatcacttcaaaatctggattttcgtatctatctgtatatgctcctgggatataaaaaccactgtgtaaagatatgttgtaggctgggcgtggtggctcacccaaagtgctgatcccagcactttgggaggcccaggtgggtggatcatgaggtcaggagttcgaggctagcctggccaacacggtgaaaccctgtctctactaaaaatacaaaaattagccgggcatggtggcacgcacctgtaatcccagctactcaggaggctgaggcaggagaatcacttcaacccaggaggtggaggttgcagtgagccaagattgcatcactacactccagcttgggcgacagagtgagacttagtctcaaaaaaaaaaaaaaagatgtgttctagaagtcaatagaaaagccgggcacatgttcacgcctgtaatcccagcactttgggagaccgaggagggagggttgctcaagtccaggagttcaagaccagcctgggcaacatggcaagatcccatctctatgaaaaaaaaaattaaaaatcaactgggcatgctggttcatgcctgtggtccgagctactcaggaggctgaggcgggaggatcacttgaacccaggaggcagggtatattagttttgatgctgttgataaagacatacctgagactgagaagaaaaacaggtttaattggacttacagttccacatggctggggaggcctgagaatcatgacaggaggtgaaaggcacttcttacatggtggtggcaagagaaaatgaggaaaagcagaagcagaaatccttgataaaaccctcagatctcatgagacttattcactaccacaagaactgcccccatgattcaaatgatctccctccacgtacctctcacaacatgtgggaattatgggtgtacaattcaagatgagatttgggtggggacacagagccaaaccatatcattttgcctctggcccctccaaatctcatgtcctcacatttcaaaaccaatcatgccttcccaacagtctcccaaggtcttaactcatttcagcattaacccaaaagtccacagtccaaagtctcatctgaggcaagtcaagacccttccacctatgagcctgtaaaatcaaaagcaagctagttacttcctagatacaatgggggtacaggtattgggtaaatacagccattccaaatgggagaaattggctaaaacaaaggcattacagggcccatgcaagtccaaaatccagcagggcagtcaaattttaaagctccaaaatgatttcctttgacttcaggcctcacatgcaggtctcactgatgcaagaggtgggttcccatggttgtgggcagctctgcccctgtggctttgcagggtatagcctccctcctggctgctttcacaggctggcattgagtttctgcagcttttccaggaacacagtgcaagctgttggtggatctacaattctggagtctggaggacagtggccctcttttcacagctccactaggtggtaacccagtagggactctgtgtgggggctccagccccacatttcccttctgcactgccctagcagaggttctccatgagagccccacccctacttctgcctgggcattcaggcgtttccatacatcttctgaaatctaggcagaggttcccaaaccccaattcttgacttctgcgcacctgcaggctcaaaaccatgtggaagctgccaaggcttggggattgcaccctctgaagccacggcccaagctctatgttgtccccttacagccacagctggagcagctagaatgcaagacaccaagtccctagactgcacacagcacagggaccctgggccctgcccatgaaaccattttttcctcctagacctctgggtctgagatgggaggggctgccgcaaaggtctctgacatgccctggagatattttccccattgtcttggggatgaacgttcatctcctcgttacttatgcaaatatctgcagccagtttgaatttctcctcagaaaatggggttttattttctatcccatcatcaggctgcaaattttctgaacttttatgctctgcttcccttttaaaactgaatgcctttaacaggacatcttgaatgctttgctgcttagaaatttcttccaccagataccctaaatcatctctctcaagttcaaagttccaataatctccagggcaggggcaaaatccaccagtctctttgctaaaagataacaagagtcacctttgctccagttcccaacaagttcctcatctccacctgagagcacctctgcctggatttcattgtccatatcattatcagtatttttgtcaaagccattcaacaagtctctaggaagttccaaattttcccacattttcctgtcttcttctgagccctctaaactttccgacctctgtctgttacccagttccaaagctgcttccacattttcaggtatcttttcagcaacaccccactctactggtaccagcttactatattagtccattttcatgctgctgataaagacatacccaagactgggaagaaaaagaggtttaattggacttacagttccatatggctggggaggcctcagaatcatggcagaaggtgaaagccatttcttttttctttctttctttctttttttgagacagacagagtcttgctctgttgccaggctggaatgcagtggcgtgctcttggctcacggcaacctccatctcccgggttcaagtgattctcctgcctcagccttccaagtagctgggactacaggcacatgccaccacgcccagctaatttttgtatttttagtagagatggggtttcaccatgttggccaggatggtctcgatctcctgacctcgtgatctgcccaccttggcctcccaaagtgctgggtttacaggcatgagccaatacacctggctagtgaaaagcatttctgacatggcggtggcaagagaaaatgagaaagaagcaaaagtggaaacccctgataaactcatcagatctcgtgagacttattcactaccatgagaacagtatgggggaaaccaccaccttgattcagtctcccactggtccctcccacaacacgtggggattacgggagtacaattcaagatgagatttgggtggggacacagagccaaaccatctcaccgaggttgcagtgagccgagaatgcgccattgcactccagcctaggcaacagggcaagactcctcaaaaaaaaaaaaaaattagctgggcatggtgacatgtgcctgtggtcccagctacttgggaggctgaggcaggaggatcgcttgagcccaggaggccaaggctgcagtgagctaagatggcaccactgcacctccagcctgggcaatagagtgagaccctatctctaagaaaaaaaaaaaaaaagtcaatagctttgctggtactgggcccgtttcctgcttgctttgtggctattgccagatctgagtgatggctgcccctttgagatagggcagggtctacagtcttggcctccagacacccaagctggcaacccttaaatgatatcatgtgtgtacaatagttggcacaagacctgcacacagtaaataatgatattaataataatactcattcccgcatataaccctaagtgtactaggtactgtttcacgtgctttatttatatttattcatctaagcctcataacaaccatatagggcagagactattatttttccattttacagacaggaaaactgaggctcagagaggtgaagtgatgtgccccaggaaagctcagcttagaaatggcagagctggctcatgcctgtaatcccagaactttgggaggccaaggtgggtggatcacctgaggtcagtagttcaagaccagcctggccaacatggcaaaactacatctctactaaaaatgcaaaaattagccaggcatggtggcacatgcttgtaatcccagctactcgggaggctgaggcaggagaatcgcttgaacctgcgaggcggcagagattgcagtaagctgagattgcaccactgtactccagcctaggaggcagagtaagaccctgactcaaaaaaaaaaaaaaaaaaaaaaaaaagaaaagaaaagaaaagaaaagaaatggcggggctgggattgaacttgggcagttccagaacctgtgtccttaaccactaactgttcaacagtggtcaacgcccctcactttttctgcatatccctcccaccctgcccaggcttcactcccggtctaccctctgtccctttctccccaggtgagccaggctccatgactgtaacttggaccacatgggtcccaacccgctctgaagtgcaattcgggttgcagccgtcggggcccctgcccctccgcgcccagggcaccttcgtcccctttgtggacgggggcattctccggcggaagctctacatacaccgagtcacgcttcgcaagctgctgccaggggttcagtatggtgagaggggccccaggctgagctgttgaggaggagtgggaagaggagtgggatgcagactagaagctaccactggccggtggctcaggctgggctggtaactccactgcctatctgcaagcctgttgtatgagaccccaggatgaaaacggaaggtgccggggaaggcagaccgaaggggcatgggccagcccccaccagtccccccatctcctcccctccaccagtcggggaaggatggggttggagggagggtcccggggcgccccagctgactgcgaccttttcctctcccattcagtttatcgctgtggcagtgcgcagggctggagccgtcggttccgcttcagggccctcaagaatggggcccactggagtccccgtctggctgtgtttggagacctgggggctgacaacccgaaggccgtcccccggctgcgcagggacacccagcagggcatgtatgacgccgttctccatgtgggtgaggcatccgcaggggcgcgcgcagggacggtggggggcgcgcgcagggatggtggggggcgcgcgggtcgggggcgcgcgggtcgggggcggtgctaggaccgtggaggggacagggctggggccagtgtgtctctgaagggacaggggatgagactggctacggagacggtgtctgtggccaaccagcctgcctaggttaaaatcccaactctggcgctcttgccaggagcaggggttttcccccgtatattttgattagagagaaagctggttccgagttcgcaggactgttgtgatgactacgttagttcgctttgcctcgcagggtgcaggtgcacttcggtgtccttgtgctggttattattattattgctgctgttgttatttaagagggggaagggaattagatgggtaatggggattggggattgtgtgcttcaaagtgcagactctggaatcaggctccctaggttttatttctacatcttcactagccagctgtgtgacctggggcctcagtttccccatctgaaatgggaataataataataatactcatcttgggccaggcgcagtggctcatgcctgtaattccagcactttgtgaggccaaggtgggtggatcacttgaggtcaggagttcgagaccagcccagccaacatggtgaaactccatctctactaaaactacaaaaattagccaggtgtggtggcaagtgtctgtaatcccagctgcttgggaggctgaggcaggagaaccgcttgaacccaggaggcagaggttgcagtgagccaagatggcaccactgcagtccagcctgggcagcagagggagactctgtctcaaaaaaaaaaaaaaaaaaaaaaagtgcccatcttggcccggcacagtggctcacacctgtaattccagcactttgggaagctggttttgaattcctgggctcaagtgatactcttgccttggcctcccgaagcgctgggattaacaggtgtgagtcaccatacctggctctctcaattccagtgaaagcagagctgggcctgggtcctcaccctccttccgccccctcccccaggagactttgcctacaacctggatcaggacaacgcccgtgttggggataggttcatgcggctcattgaacccgtggctgccagcctgccgtacatgacatgccctgggaatcatgaagaacgctagtgaggactgagggtggtggcggtgggcgagggctggatcaatggaaatggtctcgttcttcttagtgtctcccttgagtctctcatgctgcaacatttcaattgtggtagcaagaggagatgggggtgggctggaagctggactcagggcctgacagtggcggggtataggagtagggctatgaaattcagtccttcacctccatcccttgtacttcctttattccagcaacttctctaactacaaggctcgcttcagcatgccgggggataatgagggcctgtggtacaggtaatgtgggggtgctgggggactggccctctcccctgaaggatgggagatgcaggggagccctggtccctgacccctgccctttgactcctccagctgggatctgggtcccgcccacatcatctccttctccaccgaggtctatttctttctccattatggccgccacttggtacagaggcagtttcgctggctggagagcgacctccaggtaacctgggtggaggcccctatagtcccctggccagccccacctccccctccacccctgactcctagcccctcaccctgggcccttctccctagaaagccaataagaaccgggcagcccggccgtggatcatcactatggggcaccggcccatgtactgctccaacgcagatctggacgactgcacacgacatgaaagcaaggtgaggtccctccctgggagacagtggggacatgctgaaagccaggtgggcgtcagtctgcgtcaccctcacccgctcattcaccctgcccaggtccgcaaaggcctccaaggcaagctgtacgggttggaggatcttttctacaaatatggtgagcgaccctcaggacccatgccccacaccccacctctccccaattcagaggtctgatccccgcttgctctatctcaggagtggatctgcagctgtgggctcatgagcactcgtatgaacgactgtggccaatttacaactaccaggtgaggcacgtgaagggctgagcgcccacacagctggggtcagggtggtcagaaggcccaggcatggcctcgagtgactgcctgccacccaacgttgttcccttccccaggtatttaacggcagccgagagatgccctacaccaacccgcgagggcctgtccacatcatcacaggatctgctgtgagcagggggaagggtggctttgccttctctctctattcctatctatggagggctaactttgttccagactgagtgctgggtgctttatatagtggatatcacttaaccctcagccctaaggtcgggaactcctagcggtatgttcattggacggatgtaggaacagaggcacagacaggaaaatacttgctcaaagtcgcaggtcaaataagtggcagaggttgggagctcccccaccataaagttactctagttccctttttaattaataactaccatggaggtccaggcacaatgactcatgcctgtcatcctagcactttgggaggccgagtctggaggatcacttgaggccaggagttggagaccagcctggcaaatacagcaaaaccttgtctatacaaaaaaaaaaaaaaaattaaaaaagaaattagctgggcgaggtggtgcttgcttgtaattttagctattcaaaaagatgagtcaggaggattgcttgagtgcaggaggtcaaggctgtagtgagctgagatctcaccattgcactccagcctgggcaacaaaatgagaccctttctctcacacacacacacacacacacacacacacacacacacaaaagatactgggtggctaggtgcagtggctcattcctgtaatcccagtactttgggaggttgaggcaggaggattgcttgatcctaggagtttgaggctacaatgagttatgatcgcaccaatgcactctagcctgggtgacaaagcaagatcccatatctaaacaacaacaaaaaaactatcttgggggagatcctgttagaccatgcaaatgtcatgtttcttttttttttttcgagacggagtcttgctctgttgcccaggctggagttcagtggcatgatctcagctcactgcaacctccgcctcctggttcaagagatttccggctaatttttgtacttttggtagagatgggatttcaccacgttggccaggctggtctcaaactcctcacctcaagtgatctgcctgcctcggcctcccaaagtgctgggattacaggtttgcctggcccaaatgtcctgtttctcctcaaactttcaccctcttattttcaaacccattagtggacgctgcctgttaacagttattactaagctgttccaatgaagacttttctttctttctttctttctttctttctttctttctttctttctttctttctctctctctctctttctctctctctctttctttctttcttttcttcctccctcccttccttccttccttctttctttctttttttttgagacggagtttcactcttgtcacccaggctggagtgcagtggcacgatctcggctcaatgcaacctccacatcccgggatcaagcaattgtcttgcctcagcctctcaagtagctgggattacaggtgcccacccccatgcccggttaagttttatatttttagtagagatgaggtttcaccatgctggcgaggctggtctcaaactccggacctcgggtgatcagcccacctcggcctcccaaagtgctgggattacagacaagagccactgtgcccggccttacagtgccattctaatggggattttctgtcgccctcactcttccaagatttacgaattgagatcctcttgcaaggctgacttgtgtcttctgccacatttgttcagttggttaattgtttatttatgtccgtgtgaactcatgggtaatttattttactctgcgggttattatccaacatgagtgttatttatctggatgtttaagttgtgccagctttggccatcagtgggctcctgtctcctttccactcatcccctccttattctctggcacttcaaaacattccaggatcatcatgtgtttttttttttttttttttttttttgctcagccttagaatctaccccttctccatggagcgaggcttagttttttaattttttaatttaattttaaaaattttggccacatgcagtggctcacgcctataatcccaacactttgggaggctgaggcaggcaggtcacttgaggtcaggagtttcagaccagtctgggcaacatggtgaaaccccatcgctatcaaaaaatacaaaatttagccatgcgtggtggtgcacacctgtagtcccagctacttgggaggccaaaatgggaggatcatttgagcccaagaagtcaaagctgcaatgagctgagactgtgctactgcactctaacctggggacagagcgagaccccatctcaaaaacaaaaatgtttttaatagagacagtctcactatgttgcccaggctggtctcgaattcctgggcttaagtgatcccccagctcggccttccaaagctgcttcttacaaatgattaagagcaaagtgaggctgggtgcggtggctcatgcctgtaatgccagcactttgggaggctgaggtgggtggatcgcttgagtctaggagttcgagaccagcctgggcaacatgacaaaaccctgtttctggtaaaataataattattattatcattatatatatgtatacatatatataaaagtaagaatcacttgtaataaaaattcaaacagttacagagggcaggaggtgaacagaagccactcacaccacacattgccccactctcggttgttgactctttttaggcattttacaatgttctctgcatatacaaaggagtaattgtttagatagagacatgttactgtattgcttacttaaaaaaaaaagcacttagatcgtgggtcatgccctagtggttctcaaacttggtgcacatcagaattacctatggagctttcaaaagtccagtgcttgggcctgaccccggacaaaataccagaatccctggcattgatctcccagagtagctgccacacggagcatgaaatagaatgctgtgagcaccagatggcttctcacggcccttggcagccaggctctgcccatgggtgattgctattctgattttatcagcacaaattggtttttttctttaattaagaaatttgaggccgggcgcggtggcttacgcctgtaatctcaacactttgggaagctgaggcgggcagatcacccaaggttaggagtttgagatcagcctgcccaacatggcaaaaccccgtctctacttaaaacacaaaaaattagccgggcatggtggtgggcacctgtaatcccagctactcaggagggtgaggcaggagaatcgcttgaacccaggaggcggaggttgcagtgagccgagatcgtgccattgcactccagcctgggcaacaagagcaaaactctgtctcaaaaataaaaaagaaaaaataaattgaaattatttcagaccaacagaaaagttgcgctaacaatacaaggactttccatatccacttcaccaatatttcccaaatatgaacatttaaccacttttatttatttatttatttattttgagacacagtttcactattgttgcccaggctggagtgcaattggcgtgatctcggctcaccacaacctctgcctcccaggctcaagcgattctcccacctcagcctcctgagtagctgggattacaggcttacgtcaccacgcccggctaattattgtatttttagtagagacgggggtttcaccgtgttggccaggctggtctcgaactcctgacctcgtgatctgcccgcctcggcctcccaaagtgctaggattacagccatgagccactgtgcccggcgtctctttcattcctttcatcagaaacattctctactctttcttcatttttcatgaccttgacaattttgaaaagcacagcgagttgttttgtggaatttcctttgggtttgtttgatgtctgctcatgattagatagaagttgtgcatctttgctaagaatacacaaaacagatactgtgttcttcccaatacatcctgcaaggaggcgcatggtgtcttttttgagttaggatctcactctgtccccaaggctggagtacagtgttacaatctcggctcactacagcctggacctcccaggcttaagcaattctcccacctcagcctcctgagtagctgggattacaggcatgcaccaccacgcccagctaatttttgtattgacagggtttcgccatgttgcccaggctggtcttgaactcctgggctcaagcaatctgcccgcctcggcctcccagagtgctggaattacaggcgtgagccactgtgctcggctgcacgatgtctttttaacctctttgagcctctgatttctcagctgaaagtgtggtacggatgggtctcattactgatgatgcttactttgatcacttggttagggaggtatcagccagccatctccaccataaagtgactctcttttttcctttgtaattaacaagcatctcctggagagatactttgagactatgcaaacatcctgttatgcctcaaactttccctgctagttttatcatccattcatgatccttgcttcaatccagtactataatgctgggtgcaaaatggtgattttcctcaccctggcatcctctctgctcctcatgcctggcttttctgctgcaagcacgagcattctgtttccccaggcgctgttgttttaaaaagctttcttggagggtctactgtgcagccaggcttcagatccagtgatttctctgttcttcaaattgctttttctccttcacacacatcttggccatctttctgtatcaccccgcttccctgctttgcgatggctgtgctataatgtatttaactgactccctgatgggcgttgggatggcttccagttcagggctttcactgtaatgctgtagtgggcagccttacacagccgtgtacttttctagaagtcagagacccggagcaagggaagcctgcctgggacaaattgttcaattgtgagtattattgtggccaagtctttttgtttttgtttttgtttgagacagtgtcactccgtctcccaggctggaatgcagtggcacaatctcggctcactgcaacctccacctcctgggttcaagcaattatcctgcctcagcttcccaagtaggtgggagtacaggtgcccaccaccacaccaggctaatttttgtatttttagtagagacagggtttcaccatgttggccaggctggtctctgactcctgacctcaagtgatccgcccttcttggcctcccaaagtgctggaattacaggcatgagccactgcgcccggcctctatggtggtcaagtcttcactgtcttccttgagggcagcagggtcctgggctagcaggtcatttctgcttccccgcgggtcctccacctgctctgggtctgatcagttctccccgccccagggctgtgaggagcggctgacgccctttgctgtcttcccgaggccctggagtgccgtgcgtgtgaaggagtacgggtatacgcggctgcacatcctcaacgggacccacatccacatccagcaggtgtcggacgaccaggtcagtgaggggcaggccgaagtcacctgactgtacagccaggcccctccaagcaaatgagctgttaaaaacgtgggctcggccgggcgcagtggctcatgcctgcaacacctgcaatttggtggggctaaggtatgaggatcgcttgagtccaggagttcaagaccagcctgggtaccatggtgagacctagtctctacaaaaaatacaaaaaatggccaggcacggtggctcatgcctgtaattccagcactttgggaagccgaggcaggcggatcacaaggtcaggagatcgagaccatcctggctaacatggtgaaaccccttctctactaaaaatacaaaaaaaattagccaggcgtggtggcaggtgcctatagtcccagctactcgggaggctgaggcaggagaatggcgtgaacccgggaggcagagcttgcagtgagccgagatcgcaccactccagcctgggcgactgagcaagactctgtctcaaaaaaaaaaaaaaaaaaaaaattaggccaggtgcggtggttcatacctgaaatcccagcactttgggaggctgaggtgggcagatcacttgaagtcaggagttagagaccagcctggccaacatggtgaaaccccgtctctactaaaaatacaaaaatgagctggccatggtggcgggtgcctgtaatcccagctacaagggaggttgaggcaggagaatcacttaaatctgggaggtgaagtttgcagtgacccaagatggcaccactgccctccagcctgggagacagagtgagactctgtcttggaaaaaaaaggaaaattagtcaagtgtggtggcagatgtctgtagtcccagctacttgggaggctgaggcaggaggatcacttgagtgcaggagttagagtttgcagtgagctatgatctcgcctctgtactccagccttggcaacagagtgagaccctaactcaaaacaaaaaaacgaacaaatgtggactgtagaactagaaacctgctcctgctgcttaccagctgagtgaccttgagtcactcatctaattttttttttttttttttgagatggagtctcgctctgtcacccaggctggaatgcagtggtgcagtcttggtttactgcaaccgccacctcccaggttcaggcaattctcctacctcagcctcccgagtagctgggatcacaggcgcccaccaccacacccggctaattttttgtatttttagtagagacagggtttcactgtgttggccagaatggtctcgaactcctgacatcaggtgatctgcctgcctcaacctcccaaagtgctgggattacaggtgtgagccactgtgctgggcccacttatctaacttctttgcctcagttttcccatctgtgagaggggataatcatagtttccacctcacaggactacatgggggttgaaggacttattatatataaaatgcttagaagagtgcggaacttggtaaattctgtaggtatttaccattgtgaggcaggggaagataaagatggggggtgggacacaggtaggggaaaacaataagatgagtatgtggtacaggtggcttaaggttaggtggatccaaataataatggctcacctttctttatttttgccattgtagttttaaaataatgacaatatttatgatttattgagcacctactgcataccaggcactgcctagatgctctgcatttagtagcactttatttatttatttgtttttgagacagagtttcaccctgtcgcccaggctagagtgcagtggtgcaatctaagctcactgcaacctccacctcccaggttcaagcaattctcctgcctcagcctcccgagtagctgggattacaggcacatgccaccacacccggctaattttttgtatttttagtagagatggggtttcaccatgttagccaggctggtcttgaactcctgacctcaggtgatccacccacctgggcctcccaaagtgctgggattacaggcatgagccaccgcatgcggccccagtagcactttatacaccaaaacaatcccacaggagtggatttcctctccattttataggtgagggaactgaggctcagagaggggaagtaattttcccagggtcacacagttggaggacggccaagctgggatctgatagctaccatttatcgagtggcacatgcaccgggcgcagacttttgtgtgcatgatctcactctgttctcatgatgactctgggcatctattactttgtgcattgcatagaacatggaagttttgctcagagagtccagcaacatgcttaaggccacctagagggtggatgcgctggccaggtgcagcagctcatgcctttgggaggctgaggcaggcggatcacttgaggtcaggagttcgagaccagcctggccaacatggtgaaaccttgtctctagtaaaaatacaaaaattagccaggcatggtggtgcatgcctgtaatcccagctacttgggaggctggggcaggagaatggcttgaacctgggaagcggaggttgccactgcactccagcctgggtgacagagcaagactctgtctaaaaaaaaaaaaaaaaaaaaaaaaggagagagagagaaagagtggatgtgctggaatataaagcaaggtctgtctgactccagagtttgtgctctaataatagcctacacttacatagccctttccatatgctgggctctgtttacaaatactatctcatttaactcccacaacatctatgatgtgggtactgttactcttcctatcacttttcagatgaggaaaactgaggcccagagaggcctagccacttgctcagggttgtacagcccatcagagggcagagaggggactggaacccaggccatgtggccccagagttcaggctttcagctctaactactgtccctgtttttgtccctcacaggatgggaagatcgtagatgatgtctgggtggtgagacccctgtttggccggaggatgtacctctagggatggcggcagctctcctccagaagcctaggttttgccgccttggctgctgtgaccagaaactgcccaggcctgggtggggagttgggtgggccctgactcccctgccctccagaggccccatgtagggtacatgcagccctatggagctggggcagctgttccctcctggagaggtgggagtcctggctggctgtggagggagggcaggtgtgcgggcacagagtgacacacggcaggtttctgctggcagggccccaccctcctgcatagctctgatcgggcgaggtgcccacggggcttcaggaatgaagaggcttaagctctggctccatggattctgcacatctgcgggggatgccgctgggcttcctcctctcctgcccacctggcaagggcatcgccaggtgggcacaaccgtcatgacactactcaccagcaggtggcgtcaggggctttttcttctgagcccggcactgagagttggtctgaagcctggctccttcttcactgctccaggactgctatgaagagtcccttcatgcctcagtttcccagcctggcaccatcttattcgggaagaggagacgtgttaacactcttgcctcctagctaggacagatgacaaaccgcaagagccacagacttgccagttccttccctctttccttcctttctttcccttcttttatttattgaatcataatttattgagcatctaccatgtgccaggctctgttctcagtgctggagagacagctgtgaatgagacagagatctcggccctcacagagctgacatcctaaccagagagttggacaaaaatcacgataaatgagttggttaaatagcgatttgtgagtagaaaacgcagggacggtgagagagcagtttcaattttcagggggatctcactgagagggcaacatttgatctgaaggaggtggggaaggagccaagtgggcagacatctgggggaagagcattccaggcagaggaacagccagtgcaaaggccctgagacagaaatgtgcctggccggctgggtacagtaactcacatctgtagtcccagcactttgggaggccgaggcgggcagatcacttgagcccaggagtttgagaccagcctgggcaacacagcgaaaccctttctctaccaaaaatatgaaatttagctgggcatggtggtgtgtgcctgtagtcccagctgctcaggaggctgaggcgggaggatggcttgagcccaggaggttgaggctgcagtgagccatgattgcgccactgcaccccagcctgggcaacagagcaagaccctgtctcaaaaaatatatataaataaaaaagttttaaaaagagaaaaataaacaaagaaacgtgcctgccctgttggagtgtccacgaggaggccactgtggctggagcagggagagtgagagggagaccaagcttgaggacagggcagtggtggggatggcttgtatggagccttacaggccacggtgaggactttgggtggagccaggggaggctctgagcaggtgaaggaagtgatcggactccacgagtcacaggcaaaggccccagggctgacagctgccccagggcctgcgggctcccagccctgccagatgacctgagatctatctattcccccgtcatggggcgcggtttctgcctccacagatttcattccctcccacccgcccctcacttggcccaaggcacgcaggactccttgccgttcctggaacacagccagctctttctcactgcggggcctgggcgctggctgtctgccccctgtgtgccctctccccagctcatcccaggctggcgccttctcaacctcaggtctcagactcggtgtcccctcctcagaggccttccctgctgaccccagctaaagtagcctgtgttgctgcctgccccacccccgttttacttcgatctgcaattctttccttgattggttaacttgttcattggctgtttacacccgtaaagctaagtctgtgagggtggtgaccatgagttcaacgcctctgccaaatcctcccaggccccttcttgggctggattggggactctgggctccccgctagttccagtcctgcgcattctaggccatcaccgtttggggatgggtctctctgactcccccactggacttcaacctcagagggatggggcccagagctgcgtcccagcattgcccagcacaagatagatacttaataaatattgattgccttaatgaaggccaccacatgccaggctccagccgggcaatgccagggacagcgatgaatcagctacagtcatgccctctgggagctcgcaggcaggcagggaaacacggttactcaacacaggtgatgagcagtaagagaatcccgtggcgggccgggccaagacggtgaggtcacaagctggacggtcatggagtgctgtggccgccgactgaactggtgccctgtgtgggtctggcatgccctgtcccgggctgggtgaggctgtggacatgccgggaggtggcaacctccacagagggcagaggtcagacactggagtcaaacagaaactggttcaaatcccagccccaccaattcctgtgtgaccatgggcaagtcggcaaccctctctgaatctctgtttcttcatctataacccaagaatgataatactctgtgaggctgccttggggttaaatgagattgaaagccttgggatcgatattgattcctctttttctcatgctccacatccaagtatctggaaaatcctgtttgccttgccttcgaaatcgatctagactctttttttttttgacatggagtttcactcttctcgcccaggctggagtgcagtggtgtgatctcggctcactgcaaactctgcctcctgggttcaagcaattctcctgcctcagcctcccaagtagctgggattacaggagcctgccaccacacctggctaatttttgtatttttagtaaacatggggtttcacagtgttggccaggctggtctcaaactcatgacttcaggtgatccacctgccttggtctctcaaagtgctagaattacaggtgtgagccactgcgcccagctcgatctagactctctacgcttttggcacccccaaagcccccaccctggtcctgtctacactcatttcctacagactccttggacttcctgctccctccttttcccgggagtctgttccccacacacaaccaaaggcacctgtgaacacctgcatcagatcacatccgcccctgctcagagccctcctgtggctccgtctcaggtccacgaggccccagacgatctgcccctgtcacccctgtgtcctcaccccctccaatcacccccctcgcccactctgctgcagccacactggcctctgcattggactccccacccacttttgcactggcagttccctctgccggggacactgttcccccagggatctgtatgactccctttatccccccctcaggcctttgctcagtgccaccctccctgaccctcttgtttaaaacagctccacctaaccggaggtcatcaggttcggtgaaataagccaggcacagaaagacaaacctcgcatggtctcactcatttgtgggagctaaaaatcaaaacgatgtcatggacacggcgagttagaaggatggtgaccagaggctgggaagggtgctgggaggctgcaggggatgggctttttttgtttttgtttttgttttttgagacggagtcttgctttttcgcccatgctggaatgtaagggtgagataccggctcactgcaaactctgcctcctgggttcaagcaattctcctgcctcagcctcctgagtatctgggattacaggcacccgccaccacacctgactaatttttatatttttagcagagacagggtttcaccatgttggccatgctggtctcgaactcctgatctcaaatgatccgcccgcctcggccttccaaaatgctgggattacaggcgtgagccactgcacccagcctcggttttgttaatgggctaaaaaaaaaagaatgaataagacctactatttgatcacacaacaagatgactattctcaataataattgtacatttttaaataaccaaaagagtgtaattgggttgtaacacaaaggataaatgcttgaggggatggataccccatgcctgtatcaaaatatctcatgtaccccataaatacatacacttactatggacccaacaaaaattaaaacctaaggctgggcactgtggcttatacctgcaaccccagcactttgggaggccgaggtgggaggatcacttgaagtcaggagtttgagaccagcctggccaacatggtgaaactccgtctctagcaaaaatacaattagctgggcgtggtgatgtgcacctgtggtccagctactcaggaggctgaggtgggaaaatcgctggagtccgggaagttgaggctgcaatgagccaagatcgcaccactgcacgccagcctggatgacagagtgatatcctgtctcaaaagtaaaaaaaaaattaaataaattcttaaaaaagtaataattaataataaaataaaacagctttaccctccatacacctcccatctcccttctctgctttatattccttcaagacactgagggctgggagcgatggttcatgcctataatcccagcactttgggaggccaaggtgggcgggtcacctgaggtcaaggagatcaagaccaaccggaggtcatcgggctggccaacatggtgaaaccccgtctctagtaaaaatacaaatttagctgggtgtggtcatgcacacctgtaatcccagctacttgggaagctgaggcaggagaattgcttgaacctgggaggcagaggttgcagtgattcaagatagcaccacctgcactccagcctgggtgacagagcaagattccatctcaaaaaaaaaaaaaaaaagcatttagatcttgtgacccactatatacatacatgtttgattatttttttccttttctcccccaagagaatgtgagctccctggacaacagggtttttttgtttgtttgttttttgccagttctgtcccctgctgttaccttggtcactggtatatagtaggtgctcaataaacatggtttacgtggaagaaagaaggaatgagaaataaaggtaagcttagcacagggcctggcactgagggatgcttatcagtaggaatgacagtgacttaggtgactcagataaaggctcagccctcgggagctccccgtggctgggtgcgcagcagacaggcacgcaggactggttgcaacacctgccctgtgtgacgtgcacaggaagttgcaggttgcagggccagagaccctgaagcttctgagaggcgaagctgagcaaggtctttttttttttttttttttttgagacagggtctcactgtgccgcccaggttggagtgcagtggtgcaatcatggctcactgcagccttggcctccccaggctcaaatgatcctcccacttcagcctcccgagtttctggaactactaggcgtgccaccatacccagctaatttttgtattttttgtagagatggggtcttgttatggtgcccaggctggcctccaactcctggactcaagcaatcagccagccttgaccttccaaagtgttgggattataggcgtgagccaccacgtcccccgccacaaggctttcaaaggccgcacagatgcctacgctgcaggctggggttgggaggtagcgggtggtcccagaaagggaagcagggccacggggagagctcatgggaaggctgggggatccatggggctctggattcattcatcaataagtatttatttattaaactcctttgttgctcaaatcagccagaagtggtttctgttgatggcaactgagaaccatgaaagaaacattgaccccctgtgaagggaaaacctttgaaactgtgttttttctctgctctcacaccacaacggccaggtgcggtggctcacacctgtaatcccagcactttgggaggccgaggcaggcggatcacttgaggccaggagttggagaccagcctggccaacatggtgaaaacccatctcttctaaaaatacaaaaattagccaggtgtggtggcaggtgcctgtaatcccaggtactcgggaggctgaggcaggagaatcccttgaacccgggaggcagaggttgctgtgagccgagatcgcaccactgcactccagcctgggcaacagagcaagactctatctcaaaaaacaaaacaaaacgaaacaccacaacaacaatcatcaacatagactgtgatcaaacgcagggggcgggttcttccacagaccaggcagcagacaccagctgggtgtcctccaactcatttctgacaccatctacccaaagacggcctcagatcccacaggttgagggttcagtcccacacactgctccctccctccccagccgcatgtctgggtctccggaacttctgactggccagcttcaagttagggtttccacgaccccctcttggggttcgatttatttgctagagcggctcacagaactcagggaaacagttacatttgcaggtttatgactaaggatattttaatgaagagatgcatagggtgagcatagcagcttctgtccccatggagttggggcgcaccaccctcccagcacctggatgagttcttcttttattcttattttttgagatggagtgtttcactcttgttgtccaggctagagtgcagtggtgcaattttggctcactgcaacctctgcttcctgggttcaagcgattctcctgcctcagcctcccaagtagctgggatcacaggtacctgccaccacacctggctaatttttgtattttcagtagagacggggtttcaccatgttggctaggctggtcttgaactcctgacctcaggtaatccacccaacttggcctcccaaagtgctgggattataggtgtgaccgactgcacctggcctatttttattttattttttgagacagcgtcttgctctgttgcccaggctggagtgcagtggtgcaattacagctcactgcagcctcaacgtccagggctcaagcaatcctcctgcctcagcctcccaagtaactgggaccacaggtgagttccaccatgcccggttaattttctaaattttttttttttttgtagagacagcggtgtggggcgaggggtaggggacgggtcttgctgtgtttcccaggctggtcttgaactcctgggctcaggtgaccctcctgcctcccaaagtgctgggattccaggcgtgagccaccacgcccggcctgcatcttatatttttattggctaaatttggccatcctaagattgagcaagggggacatggagggagatgagaatagagcatgtggagtgggcaaaaagttgagaaggagactcgcagatcctacaaacacagccaaagagacaaacctcttggaagttttttgcaagggcttctgttatatgggctccctccttggacaggagtccctcctcccagccccttcctccctccagatcttcagtgcttcttttcagcaaattttaaaaatggtaatagttttattttatttcaggtgagaaagcaacacactcattgctaaaaatatataaactcaaaccatgcaaaaaagaataaagcagacacaaacatgatagttatgtgaggtaatgcatatgttaattagctagagttagtcatcccaaaatgtatatatacttcaaacatcgtgttgtacacgttaaatacatacacttttatctgttaatttttaaaaagagggctgaaatcccaccactttgggagaccaaggcaggaggatcgcttgaggccaggagttcaagaccagcataggcaacaaagtgagacactctccccgtccttgctacctagctagctaaataaaaaagaaataataaaataaaataaaaagaatgtaggccaggcgcggtggctcactcctgtaatcccagcactttgggaggctgacaagggcagatcacctgaagttacaagttcgagatcagtctggccaacatggtaaaatcccgtctctactaaaaatacaaaaagaaattagccaggcatggtggtgtgcacctgtaatcccagctgctctggaagctgaggcagaagaatcacttgaacccgggtggtggaggttgcagtgagcctagattgcgccactgcactctagcctgatgagagagagagtccgtctccaaaaaaaaaaaaaaaacacaacatatttatatggccttttgttaaaattgataaaccaatattgatatattattattaactaaaatctaaattttattctactgcattttaaaaacattttaatataactctattgagatataattttttttttttgagacggagtctcgctctgttgcccaggctggagtgcagtggcgagatctcggctcattgcaagctccacctcttgattcatgccattctcctgcctcagcctcctgagtagctgggactacaggcacccgccaccacacccagctaattttttgtatttttagtagagatggggtttcaccgtgctagccaggatggtctcaatctcctcacctcgtgatccgtctgcctcgttctcccaaagtgctgggattataggcgtgagccactgcgcccggccttttttttttttttttttttgagacagggtctcactctgtcacccaggctggagtgcagtggtgtaatctagctcactgcaacctctgcctcccgggttcaagtgattctcctgcctcagtctcccgagtagctgggattacaggagtgtgccaccatgcccagctaattttttttttttttttgagacagagtctcgctctgtttcccaggctggagagcagtggcgcgatctcggctcactgtaacctctgcctcccaggttcaagtgattctcctgcctccgcttccctagtagctgggactacaggtgcccgccaccacgccagactaattttttgtatttttagtagagacggggtttcactgtgttagccaggatggtctcaatctcctgacctcgtgatcagcccgcctcggtctcccaaagtgctgggattacaggcgtgagccactgcgcctggtaaattttttgtatttttagtagagatggggtttcactatgttgaccaggctggtcttgaacttctggcctcaagtgattcacctgcctcagcctcccaaagtgctgggattataggcgtgaccaccacgcccggcttaagcatcagttttgaaatcaagatttcctggttacaagcccagcagagttgcttccaggtggtgggactttgttctactttccactctatttctgtgcctcaatttcctcatctgttaagtggagctaaagatcccactttaaatataaatagtgacaattagataagatcaagtagttaggcagggcatggtggttcatgcctatagcccagcactttgggaggtgaaagtgggaggatcacatgaagccaggagttggagaccagcctggccaacatatcgagaccctgtctctacacaaaatttaaaaatgagctgggtgtggtggcgcatgcctgagtcccagctactcaggaggctgaggcagaagaatcacttgaacccaagaataagaggttatagtgagctttatgatccagccattgtactccagcctgggtgacagagagaccctatttttaaaacaaaacaaaagatatgtaggtaaagtggatttagagaaggtctggcatagagggtagggaaaaacttggaagcaacccaaatgtccaataataggggattcaagtactttttttttttttttttttgagacagggttttgctctgtcacccaggctggagggcagtggccgatctcagctcactgcaacctccacacacaccccctccccaactggctcaagtgatcctcccacctcagcctcccaaagtgctgggctataggcatgaaccaccatgcccagcctgagtgcccagagtagctgggattacaggcatgtgccaccatgcccagctaatttttgtattttagtagagctggggtttcgctatattggccaggctggtcttgaactcctcatctcaaatgatctgcctgccttggcctcccaaagtgctggaattataggcatgaggcactgtgcccggcccaagtacattatgatacatcaataatattacatataaaaagcaatagttataataaacattaaaatagtacttactaatgatgaatatttgcatatatacacctttatctatgtttttttcctaaagaaagcaacactagtctttctttccctttaagatcagttcctagaagtagaattgctgtatcaagaggtagataggaatattaagtctcttaataaatatcaccaaaaagctgcccagatccagtccacagtggggtatgagagtgctgatggcgtgtactctcatcagcactaattatatattataatatattaatatttaaaaacatttttctgagagaccaaaagcaaatctcagtttaatacttatttcattaattgcttgttcaccaattcaatttttttgtattcactgttatttatttatttatttattttaggtcctttgcctgtttttttctgttgtatgtttacctttttctcttattgatctgcagatgttctttacatatgaaagacagaaagcttttcttgccatccatatgtcacaacttatctttttccttgatgtactgaaatgtatcatttttatgaagccaaatcctcttcaccctcctcgcctttttccatccctcaagagtcacctcctcaacatccccactgggaagccttctgtaggaggctctttggagtctgattttcctctcccagggtcctggagtagcagggcctgattgctcaccctgagtaagcccttggggtagatctgtccctgggattgttccaggggtctgactattgatgcaatccccaactaagttacaaggggacttccccaaaaatgagttctagaacctaaggctctgaagtttgtgcagggcgttaaagaggcaaaggctgcacctgcccctcctcccgttactatgacctgaataaggtgttgtcatctcagctcctggtcttggttttttgttttttttttttaatgaagattctgcaagacacacaagcatttcaaaagagtgcaaaaacaagaatgtttcatgctgacaaggattatttttatttatttatttatttatttatttatttatttatttatttttgagacagggtcttgctctgtcaccaggctggagtgcagtggtgcaatctttttttttttttttttttttgagacagagtctcgctctgttaccaggctggagtacagtggcttggtctcggctcactgcaacctctgcctcctgggttcaagcgattcacctgcctcagcctcccaagtagcggggattacaggcacgtgccaccacgcccggctaatttttgtatttttagtagagatggggtttcaccatgttagccaggctggtcttgaactcctgacctcatgatcctcccgcctcggcctcccaaagtgctgggattacaggcgtgagccaccgcgcccagccaagtggtgcaatcttggctcactgcaacctccacctccggattccagcgattctcctgcctcaggctcctaagtagctgggattacagacgcctaccaccacgcctggctcatttttgtatttttagtagagacagggtttcaccaagttggccaggatggtctcgatctcttgaccttgtgatccgcccacctcggcctcccaaagtgctgggattacaggcgtgagccaccacgcctggcccccagtgctgacaaggattctttaaagggcgcattctctctgaaggctggtgggagcgtgagttggatccctacagcacaatttggcaatgtgtgtcccaggccatgaggaggcagcagagggcagtcaatgagaacagtgcccgggagtcaaagctgggtttgccccattggtccttgagtttgagcaagtgaagttacttctctgagcctcagtttcctcctctggaaaagggatgaatattcacagctttagctgttacaattacatggcttagcaccctgcttcctgatgcacagaaatgcttgaaacatgggaactgttactattcttttttttttttttgagagtctcactcactctgtcacccagggtggagtgcagtgatgccacctctgccacctcggctcactgcaacctccgactcccaggttcaagcgattttcctgcctcagcctcctgagtagctgggattacagatgtgcaccaccatgcccggctaattttttgtattcttagtagaaacgggggtttcaccacgttggccaggctggtctcgaaatcctgacctcaagtgatccgcctgcctcggcctaccaaagtgctgagattccaggcggaagccaccacacccggccactgttactattcttaattcttaaagatacaccttctccttgacccagaagtttcatttgtagtaggaacaataattagagacaggcacaaggaaataattagagatggtcacaaatatttagctgcttggattttgcatgacagggagggggattatttataatggcaaggtactacagcatagatgttcaaaaggacagtgattaaacaaattcgagttcattgataggatggcatcttatgcagccattaaaactaatcttcttgaagaatatttaatgacatggaaagacactggtgatatttacaatcttgtggtttaaaagacaacattctaggctgggtgtggtggctcacgcctataattcaaacactttgggaggccaaggcggggcggatcacctgaggtcaggagttcgagaccagcctgaccaacatggagaaaccccgtctcaactgaaaatacaaaattagttgggcgtggtggcacatgcctgtaatctcagctactggggaggctgaggagggagaatcgcttgagcccgggaagcaaaagttgcagtgagctgagatcatgccattgtactccagcgtgggcaatgagagcaaaattccgtctcaaaaaaaaaaaaaaagacacaacattctttacaaacgtatgtttccaattctgtcaaaagaaaaaaggggtcagtcatggtggctcacacctgcaatcccagcactttgggaggctaaggtgagaggattgtttgaggccaggagttcaagaccagcctgggcaacacagcgagaccccgtctctactaaaaattaagaaaattagccaagccaggtgcagtggctcatgcctgtaatccaacactttggaaggccaaggcggacagatcacttgagaccaggagttcgagaccatcctggccaacatggggaagccccgtctctactaaaaatacaaaaattagccgggcatggtggtaggcgcccaggagtcgtttgaactctggaggcggaggttgcagtgagccaagatcatgctactacactccagcctgggtgacaaagtgagattctgtcgaaagaaagaggaaagaaagaaggaaggaaggaaggaaggaaagaaagagaaagaaagaaagaaaaagaaagaaagaaagaaaattagccggtgtggtggcttatgcctatagtcccagctacttgagaggctaggttggaaggatcacttgagcccaggagtttcagactgcaatcccgcctgggcgacagagtaagacccctatctaaaaaaaaaaaaaaaaacaaaaaacaaaacaaacaaaaaaaaaaacgaatgaacaaataaaaagaaaaaagataggtaaacataaagaaaaattaactcatcattcaatcattcattcattgttgccaccgacattagtagaaattaattaaatgcctactatgtggctgttctggggcagaggagaagcaccaaacatttaagagtatctctgaaggggtggaattaccacgcattcaaacagcccttccaccaatgtttactgagcatctacatgccaacagtgctggggcactgggaatgcagcagtgaacaaagacagaaatccatgttgtcatggggctgacattccagcagaggagacaaccaacaagcaataactacaattaggagtgagaaataagaacaaagcagacagagtttggtagtatgtgagagggatgtttgctgctttccttagggtgagcgagggaattagttcacagagaaagtgacatctgtgtaaagccctgaaaaaagggagggagagataaggatacctgggggaagagtatgttccaggcagaggaacaaccagtgcaaagactgtgaggtgagagcgcacctgacaagagttcaggaacagcatgaaggctggagtccagtgaataagatccaggaggagagatgtctggccgggcgcagtggctcacgcctgcaatcccagcactttgggaggccgaggcaggagtatagtttgagcccaggagttcgagaccagcctggccaacacaacaaaactctctctttaaaaataaaagaaaaaggccagcttggtggctcacacgtgtaatcccagcactctgggaggccgaggcggatagatcacctgaggtcaggagttcgacctggccaacatggtgaaacgctgtctctactaaaaatacaaaaaattagctgggtgtggtggtggacgcctgtaattccagctactcaggaggctgaggcaggagaatctcttgaacccgggaggcggaggttgcagtgagctgagatcgcgccattgcactccagcctgggcaacaagagcgaaactctatctcaagacaaataaataagtaaaaataaaatttaaaaaaatttttaaagaagatgtctgctgtttgttttcaatattttgaccaattacttcgtaaaaacttatttaaaaattgaagagcaaacagtctcaggttcccgggctcagacagaccagcgttcaaaactcattaccttctttctatgatgctaagccagctatttcaccctctgaacctctgtttctttatctgtaaaatgggtattaatgatattataccacagggttgtatatgcagcgagaaaatgcaagtaaaacacttatcccggtgcctgcctcctagtaagtgcttaagaactgtttctgcccattaactcattactttctcccagcccctaactccttctgggggggaagttagaaaatcggtatcacacgaaaacagtcatttcccctttaaggacctcagtgggccgggagccagccttcccgcaccttttccaaaatttccaatccccgcttggcattttctgcccgaaggtctccgattggacgctctgtaccaatcggaggctggagcgggccctgagaggcgcccgactccgcccccgcactggccctgcccactgcccggtcagcctcgttgctatggggactggtgggcggtgaggggggaaagccccggatgttcgttggggattcaacatggcggcgggagtgtccgcggtggtggcggtgcaagagagctgagggaggcgcgagggcgcggagttccaggtcgagcagttaggccgcgagcgactgcggcgccgagccggtaggataaggggtccggccaggggcttgcggtgggccgggcgctggcggcgggacggcgtttccgcgaggaggggggcggggccgccggggtcaaaggtcactggtggagggaagggtcgcgtccgaggggtcgggggttaacgcagactggagggagttgtagtggaggtcggagatcaaaccagcgaagggggcgtggcgaaggggagtgcaaagtttgaaattcgaagtgggggcgcgttcgaggggttctgggcgagtctcaaaaaaggcagggtcaaagttaataatttgagggaaggctgcccccacgagggtcagaggtcacagccccaggggcgccaggttggaggtttaaagctgcccctagcggagcagatgaatgagttttaggttcgggggcgtcttttaggggttcaaagctggggcgtgcctagaaggtacaaaggtgagaatctgacagcggggcagctgtttcccagagtcaaaaattaaaacccaaggagggcgtattgcgggggacgggggggggggggggggccgggtcagagatgcttcctggtgacaggagaagggggaaccctcccacaaataataatggcaaacactcatgaaacactatgggctagaccctctttttaacgctttacttgtatgagcttattcagtcctcactatagtcttagggggtcttaacctggtattaagaggttaagtgatttgcacaaggtcacccgatgcataagttgtgcgctgggattctaactccggagttctggcccagagccctgctctggccgaccgcctctcaaatcatcataatgtcggttaatgtttaatgagggctcacactgtgctccacgccctgtgtgcccggtcgtatttcactcctgctgcaatcttgtgaagtgagtgctcaagatgaacctactttacagacgggaaaaatgaggctcagaagcttctgctgaaggcagagttagaatcgaagctgggcctgggtgattccagggctcctgcccctggtcgccacattgtccgctgccagccattaggtctctcctggaagcagggggctgggcagggctgggccactccctgggcggatcggattgtctgcttggtttccttggaagggtgtgatctggcagggaagattcctgtgagcctatgggagtagggtgtttgtaggtggtctggagtccgagcaagggagtccgacgggcttctgactggggagagtgtccctgggtggtaccctgggcagagcggggtgttcactgttcttaaaaccctaagctctcactgtggtccttagtcactcccacctcacttcttatggctctgcccatttctccccagcccctttactgttctccaactccaggcccatgcctcccgcccggtctttgaccttcctgttccttctgctgggaatcctttccccaccctgccctctctcactgacgggtcgctcactctcagctggcccgggaccaccctggctcgccttgctgcaggctctttttctctcatctgaccagcccttacctccctccttaccttaattattagggtgcatggtggaattgctctgtggggttccttgcctcggtccccactgaagccctgcctggcctgcagaggatgtgacattgctgggggttgactgttgggcactgtgccgggtgctgggagtgtggcaggggacgagatccacagagcccctagcctcagagggcactcagttccctggtgggagcagagtggaaccagcccccaagccagtgacacaagactgcgtctctgcaaacggtgatgtggcttgcgagggcatcttcagagagccgggagagtgcccctaccctgggctgaagcctgagtccctttcccctgggaaggctctgaaggatggggaggagggctgggaatgggcttaccaggcaggaggagcagtgtgtgcagaggccctggcatgactggaggtcaggactcgggtgcacagttggggatctgggcaacacgtagcctgtgcaggttcagggcaagacgctgaggggactcagctttggagggacggtgggagcaggggagggctgaggagtacctgtatgtgtggagctgcctgaggccttgatggagcgtgattcagaaagcagtgctgggccagagatgcctggtacacacccctctccatcactcacagagcatgtgaggacctccgtttccacttctgcaagatgggcatagtgttagcgctgcctcatagaattgctgtgaggatgcaggctagagagccttggcccaaggcctggcatacagtagttgctgtgtaagcattagtcttgctgctgctgctgctgccaccccaccactgcctggggagggcctcagagacagtggaggccctcgctccacctgcctcctggctttctctggcagccaccccatccctacctggctctggcagggtcagggagccggcacactgccaggcagccctctgaggctggcccagcctcccagccttgcagtgccagctcactcagcatctcagggtttggcacagataaagaaggatagggtttgggcattggagacccatattcaggtccctcccttgtcacttaccagccatgggacaaatgatttatttgccacttttattccttcaacacgtttggctaggggaaaaagggctttcagtataatgaaacactcatgcatccggccatcgtctggcctgggacagaacacaccgtgatacagttagaggccaagggtctcctcctcaccccccctcctccctcccttccaggggcagcctctgtcctgggtgtggcagtcaccattcctctgcagcctttcatactttgactgcccttgaatgtattcaccaacagtagagcaacagctcttgcccctggctgcacattgcaactccctggagagctttgaaaagatgccttggcccaggcccgccatggaaattctgcttccaacttacttggtctgggctggggctggcctcaggcttttggaagctccctgggcagttcttatggccagcaggggctgacgactgttgtttcacagttcagataaatggtgtcaccataaacatgcctttctgcaagttgctgtttttgttcaacattataggtatatttgagatgggatcttgctatgttgcctagactggactcttaactcctgggctcaagctatcctcccacctcagcctctggagtagctgggattacaggcgcgcacacctgctccccgctttgagctgagcattggagtctggatgtctcttggtggggatgtgtgtaggcctgggacaggccatttgtttttcctgatggtgtttctttttgtgatcgtgtcacacaggagttgcctgttcacctgttgatggccactgaggtggtccgttggagctataaccgtgcagcagtgggccttctggaacgcgtgttcctgtagaccatggccagagtctctctggcatatgcctagtagtggaaaagccggagctccccgctttcctagcggttgccaagtcatgcccccagtggctggaccactgtgctccccagcaggctccggggctccctttatttcaagtcctgctttgggcagctttgtggccctcactgaaacgatttcctcggccgtgacatgggaggtttatgggcccacccacccacccaccaggctgtttggaaacagatggggagatggttcacacaactggcttagctgggacctcgtccccactgactccctacaaccacaggagaagaaaggatggaagggctttcacctttacccccttgggcatccaggacggtgactgcagctttgccccaactgcccttgggggcaggtgccaggggtgacagctgggaaagagaactatactgattcgaacctctcaggagggaggcagggaggacggaggtgaaagttggaggatgggtgaggccttgtaacattctttctgtgtatctgactgttggtcccagtggtaaccaacacagcccagctctacccttgtagattatagtacagtgaaggagacagacctgctgtccccagacggtgacagcccagagaggccagggctgtgaaggagaggcctaggcgagggtcagggcgggatgtgggggggacccaggcagaagggtcagggcgggatgtgggggggacccaggcagaggggtcagggtggggtggtgggacccaggcagatgggtcatggcgggatgggagcggggacccaggcagagggatcagggtgggactgggggggacccaggcagagtggtcagagaaggatggggaaacccaggcagaggggtcagggcgggatggggaaacccaggcagaggggttggggctggatggtggggaggggcacagagagggattgggactgggatggaggcgcagggaccgtaggaagcccgaggaggcatgtggcccagcgtggggagttgaggagggctttctggataagatgacatctgactgatgagaacatatgagcgaggctggaaggaggtggaaagaatgtaacaggtcatgggtacggaagtgccaaggccctgagggtcggaatgacctcggaatggtcgaggatcatcagataggccggtgtaggctatgctgtgcaccctgactgtgtggtagccttgctctgcaaagagcagttaaagaaatacataaaatataaaataaataaataaataaaaaagcaaaaaaaagaagccagtgtggctgagcagggggtggggtcagaggcttggaggcggtgttggatacagcagggcctagcagagccaggtggggtgtgtggattccattctgtgcataatgggaagtcatcagaggctttagtgacatctggttttccccttataaagattgctcaggctgctgtgtgggggacggatcgcggggggtggcgacagggaggctgtggggaggctgctgtgacagtccaagcagaagagggtggagaagacgaggggacagtgatggaggagcgtcctcgtgccagctgaggtcatcagcgctttacccctgttacctcacttcatcttcacagcaacctgtgaagtaggtgctagtatcatcctcactctagagatgagaaaggaggcccagagaggtacgggacttgcttaaggtcacacagcaggcagtggcagaggtaggattgaaccccaggccttggggcttcagtgtcactgattactggggctgccctcccgtggtttggaactggctcggacaagacaggcctgattcctgttcagctggttcttacccaggctcctttgttgacagaagttccgtggagacctgttccccctgggtagtttctgggcgctgggtccctacctccctcagggcctccctttcctttctcatctactcctcgtcccactggctcgtggtgagccagacttcctggccagacaccggtcaggggtgtccccagcagctgtttctcccatcaccgagcccagccccgcacatgctgccagcaggaagcaacctccttccaagtcatggccagggaagtgggacccttcccgcctagtcacccatccggggccaaggcttcttgtctgccagacgccttggcccacaggaaggttggaggggccgaggagggtgagaaggggaacactctcccatcccaggggagccagcgctggcggatgcgacagaagccaccgctcactgaagcctctctcctgggaccctccggtcctgccccgacccttcccaggctgggaggccatctgctgccttcccgaggggcagtggaacttccctgccagggctgctcagtccacacacatcccttagcctttttcactagctgggagcccctggggaagagacaaagaacttccctgggcctctgattcctcacctgttacagggagtattggtggccacctctcagggctgtgggagggcggaagatcatgtgtgtgcgtcgtgcttagcccgatgctcagcactcagtaagtgcttggtaaatgttgaacttggtgcgttcgatggtttccgtcccttgcaccctgtccccctctgggttctcatcccgtagtgagctgtaataaccccagccccccgcccggggtcccagctccacgtgccaggcacgcgtgtgctgtgagtctatgagcatggtcatgtggctgtacccagagaccctgaggaggaggtgtttttaacctcgtttctcttttcccgtgtttcaattttcagaaagcacgtttttcctccatgtgcatgcattacctattcccctaaataatcactgaaaaactgcacacagcacaaaaggatgtacagggacgagcaaatctctttcccacccgcctgccaggcccttcccagagatagcatcatcacccccggtttcttttctttctttcttgaaatatttgttcccccaagtgcccgcccctcccttttgtttttactcaaatggagcggacttcccatgtttatattctgtcctgtgctttgcgtttcccactccgaagctcgctgtcaggacacagagtgccgcctcgtgtcccacgcacacgcgtgcccccacggacagcacagccattctgtgctgatggccatcaggccattcccatctttccgtgctgtgaacagggctgcgcccgcctgagtgtggctgtgcatatgtctctaggtgtgagtctgagcttgtggcctcgtggtctgagacaggtgccccgttaactttgccggtagtgttagtgtttcaccctgctggggaggttgtctggctcacactcccaccccccagtgtctgatgacaccggggtttcctcactcccttgctggaatagacgggtgtcacctgacattctcacctttgccagtcagataggtgacaaacagtctcatcatggttctgattttaatcagagcaaagtgggacagctttgtgttgttgaaagccatcttgagcttccttttcttggagctgtctattcctgataattttactttctctgagaaggggaaactgaggcacaggccagcagtcccacagcaaatacgtggcagatgtggcactcaaaccttggctccgttctggagctcctaacccatctgacacagaagaggtcaagggcttggcctccggagccagctttgtctcttactagcagtgtgaccccagacaagtcacatcacctctctgtgcccgggtgtcctcatctgtaaaatgagggtgctaatgatatctactcttagagttgttttgaggatctaaatgtatattcggcaggcaaaatgtatagtaagtgctcaaagactgttagctgcgttactaatagccgtattattaatattatagctatgtcaccaatagccatgttattaatatgagcaggcactgtttgagtgctttctgtgaactaacctactggaccctcccatcaactccaagacacacgtgttcttaggatctcccttttctagggaggagactgagagcctgggggacctggccccgtcacagagcaagaggaactgggatttggatgctggaggcctggctggtaatcgctgtggccgcttcccctgctacccggggctaagcctgagggttacaaagctctccctcctgcttcccccacccaccttctgctgtctgcattccaggcaggctgcccaggagctttcgagcagacaccttgagggttgggagcaccgggtgggcagggtcctcacctagagagctccccgtcccagaccctccctgctcctgccacctgtcctgggaactcctgataaagcagcattgtgcagcggttttgagttcacttcccagcccggttttgccactcccacacttcactcccagaggcggaaggcggccggtcttcctgggctgcgtggggtgccagcccccctccccttcccttccctccctcactgcgcccacagtcaccggtcagcactggccatggggagaaagtaggaccctgcgggccactggcccctccacagacccgtccccaggtgaagacccctccctgccctccccacaggaggcccctgtccttctctcccgaggaaccctccttccctgccgcccacaggggcctccatagttctgtcgtcccttccccgcaaatcttccactgcagcctgggcccacgttatttgactctcaaatgctatatatatacacagcgcttctaactccactgcttttaaaaaacctttaataattgtcaattataatatgcccatagaaaagtgcataaaatgcacaggtaagtttagcaaagaattacaaagtgaacaacgcttccccaccacctcggtaaagacagaacacaacctcccaaaagccgcctgcccataacccctgtccatcacgaccacagtcgtgagtgctctcctgaccttggtggtcactgtgtccttgcttttcctgatagtttttaccatgaggtatgcatccttgaattacagaatgtcatcttgcctgcttttgaacttgacataaatggaatcttccagtatgtccttgtctgtgctttctttcgcccttaggcctgtgagatccatctgtgtgctgagtgtatctgtagtcattcatctttgttgctgtataatattctttttttttctttgacacagagtctcgctctgtcacccaggctggagtgcagtggtgcaatcttggctcactgcagcctctgcctcctgggttcaagcgattcacctgcctcagcctcccgagtaactgggattacaggcatacaccgctatgcctggctaatttttttttttaatttttagtagagagggggtttcaccacgttggccaggcgagtcttgaactcttgacctcaggtgatccacccacctcagcttcccaaagtgccggcattacaggcgtgagccactgtgcccagccccatataatattctgttcctccatctcctgctgcgctgatgcgagccatctctttgtagcatctcctggggtgccggtgcctgcgtttcttcagggaatatacccaggagtgcgtagcccagggcagagggtggggtagcttcagatttagtgggcgctgccacacagcctcccaaggtggtcaaatctgtgtatcctcctagcggtggtgactgaggatcttagttgctccacctcctcaccaacatttggtaccgtcagactttttggttgaccttggaacatttttattcttttttcctgcaaaagtaacaccactggttatcatcgggctgagcccctcatgttattttgtcctccccttgctcctgtccattccgactctcacccattctgtggacaggagtcaagtgcttattctttttttttttttttttttttttttttttgagatggagccttgctctgtcaccagggctggagtgcagcagcgcgatctcagctcactgcaacctccgcttcccagatccaagccattctcctccctcaccccctcaagtagctgggattacaggcatgtgccaccacgcacggctaattttgtatttttagtagagacagggttttaccatgttggccaggcaggtctcaaactcctgacttcaagggatccacctgcctcagcctcccaaggtgctgggattacagacgtgagccactgcgccctgcccaagcgtgtattctttgaccagctttgcgctggggcccagcgactgaagggtgaacccaaacaacaggcagccctccccgagctcagtccagtgggaacacagacctcgactgcagagcaacagaaagataagccgggctggaggctcccggcccccatcttcccacagtgaccccattttgggaacaggaacccccatccctcgtcttgtttcgggattaggcttctccaaatctggcaccctatcaccttgactcctctcttgcccccccgccacatccaaagtgtctggaaagcctgtcactctacatgacaatgtaacctggtgctgcgggctcctcttccttgtcactccccttcctcgtcatcccccttcttcgtcaccccccttcctcgccacccccttcctggtcacacctcttcctcgtcacccttcttccttgtcacccctcttcctcgtcaccccccttcctcatcatcccccttcctcgttaccccccttccttgttacccttcttcctcgtggccccctagttcaagccaccctcatctccctcctggaccattgaggcgtgctccctgctcccttctcccccactgtccccacagttgtccgcacacagccagaggtagccgtgcacacctggtcagggcaggaaccctcccctggctccacctctcccagcagagaagcttgcaaggtcccaggcaacctggccactttcctgcctgccctgcttccctcttctcctgccaccattcctggaacattccaggcaggtcctaccccggggcctttgttcttgctgccccctgggcaggcagcaccctccttccttctgttcagtcagcctctgctgacagtggcccccttggggagatgtttcttcccgaccatgggtccccaggagcagcccctgtcaccctccctctagcaccttcccccggtaaccctcatgatggttacttccattatgacatgtgggtctgttggtttattttgtctcccggcataacgtagcctcagggcatgggggtaggggtagaaccacagggccttgccctgccccttgctatgttctcagggattggagtgtggtagtctctcagtaaatgctggttgactgactgactgactgactgactgaactgtagtaagctgggctgccagagcgtctaatggggacccgccctgggtggggcacaccgggaaggttttcctgaggaggaaatgccacttgaaggatgaacttggcctcgactaagggaggaggctgaggcagctgccattgcagaggtctcccggcgggggagtgcagggggcctttgaggaattgaaggaagacaggtaggtcggttcttgggttggtctggattccagtcttgacagctgcttgggcctctctctgcctcagtgtcttcctctctagaaggtggctgcttcaggtgttcctggacattcctgaagttctgctcctaacacacttatcctggtgcctgatacataaatataaatgtgattgtttatttttttccaacaaatttggtggagtgctgacccgtgtggcctccagggatgcggtggtggataaacagacccggttgccgcccatttggagcctggcctctggagccatctggggcacccctgcttggaggcaggagaaggcctggtgtgaccttgggcccggggagtccttattctagatccgggaagctcttcagggtgatgaataggaaagacgaatggagggtttgtgcgtgccggccctgtgtcccggccagtgctcccaagctgctgcctgggcctccctgaaatcccaggaggtagctgcacccgtgtgacccatttcacagattgggaggtgaggggggcaccaatgctaagtccttcgcccattttgcaaactagagtagatctggtggtgtttcctctgtggtctgatgtgtttttctggtagccagtcaggtggggcagctttcaatttgttcttccagactcctgtgaaggaagggccagttcaggtcactttcctttttttttttttttgagacagagtctcactctgtcacccaggctggagtgcagtggcacgatcttggctcactacaacctccgcctgccgggttcaagcgattctcctgcctcagcctccggagtagctgggactacagtcgtgcgccaccatgcctggctaattttttgtgtttttaatagagatgaggctttgccgtgttagccaggatggtctcgatctcctgaccttgtgatccgcccaccttggcctcccaaagtgctgggattacaggcgggagccactgtgcctagtgtcttagccattcctgaggttttttttttttttttgagacagggtcttgctctgtcacccaagctggagtgcagtggttcaagattggctcactgcagcctccacctcctgggttcaagcaattctctttcctcagcctcagtagctgggactgcaggtacacgccaccaccctgggctaatgggctaattttttttatttttagtagaggtggggtttcactatgttggccatcctgttctcaaacttttttttgttgttgtatttttatagagatgggatttcaccatgttgcccaggctagtctcaaactcctgagctcaagccagctgcccgcctcagccttccaaagtgctgggattacaggcatgagccactgtaatgggcatccagcccattcttgactttttgtaattccctttaaatattagacaagcatgttgtcagtgtatgtacgtgtgctcgtgcgcacacacctgacactgagtctcccaatccatgaacgtggtatgtctctccatttgtttatgtcttctcgttcatacttttccagccgacgccttgcccacctcttgtggggtttttcccagggtagttcatgatgtggcagggagtctgtgccctccactcccacaagatgccgtgcaccctgggtttagccttgctggctgaggacctcatggcggtggcaggaggccacttctcccattctctgcttcttccctggtaccgcccctggaccctggcggagggcgggcagggtgcccagaaaggaggctgtaattttcctgaatgatttcaagggctaattaaaggtttgccttgactaatcagcttacggtttaattattagggaacaggctctgggatgcgggaagcagctcagctggggtctccccacagcgtggcaggaaggagccaggacccagccctactctggggggctggcaggatatggggataccccagcaccctccagtgggtcagtggggggttctccatcccccactgagctgtgacaggtggagggcagcaggtgtgatggagattacagccgattcctcccctgattcacatcatcccccacagcccatggctggctggggaggggctggccctgtccctccagcagctttggcagggcccgtccctccccactttcctgcagcaccccagcctcgctggcctttgtggagtgctcggacttcatttattctgtgggtcttggcttaaaggtcagcacctctgggaagcctcctcgggcctccctcctgtcagagctggtgatcagccgcacggccccttgccagttcttgggatcatggttgttcatctgctgcaactcctgcagacactgagaagtacactgagggggatgcctgagctgggccagtgtcggggtacccagcgggataaagggttcgggacctgggctccaaggagggggctgggaaggggtgttcagggaggactgagtgatggcttggaggcggctggaccaggaacacctcatgggagtttgcgaatggggaggggactctggagatggctgtgccaggcctgacttcattccttgcattcctcagcaggccccagactcctgatggtcctaagtgggggaaggtgagccagagagggccttctgggtactgccctccccccactccatcagtctgtctcagtctctctttacaccctcccccatccaggtctcagggctggatccatcctcctgcccactccccaatctccttatcctttggctgcgccttagggtcacccggggtgggaggcactgcaggggcccaagctggaccatttgaagctgactgtacagctgtggggtctgggccttggggttttttaatgctcccctggcgactctgacatgcttctgagctggagtgagggctgctggcctgcaggaatggcaacaaatgtgttttagcttttggcatgttctgggtgcttttctaggcttctgacatggaggggttaagtcacggcacgctacggggacatgtgactgtgattcctgtgttccagataaggcaactgaggcccagagaaggcctcgagcttggcgatggcagtctctgtcactgtcttatcttcccatttctggtctgtccagatgtctgtctgggccttctctgtttcacctctgtctctctccctgtttttctgcctcttatctcccttccccaccccaccctcctgcatttcagcttccctcctcccctggcagaaacttcccagatttctgtgttttgaggcaggatctggctgaagccacagaggggagatgggttctgcaggcccaggacatccttctgaggggaaggatgctgatgtcaccacgctggcctccctaacagctcctgacacgtggagtctggggctgggggcaacacaccatctgactgacagtccaagggtggctagggctggctctgcaagtttgcagggaggactgtccccacgggttgactctgacatgccctgtgacaccagccacctctacggtcccgggagtcctctactgccagttaatgtttcagcttttgtgggtaggactgcctgtcggtcagtagtttaattgcaacaaaggtttgtgctagaaaggcgaatattacattgcaagagcctttattatttgatgggactaggggggactgatagctgatggtcccgtatgtccccactcactgagggatgagggctccccttgcctcctctccccctacccctctccagcgaagggctcaggagtccagctccacctgcagcctctccctgctccggcacagcatcctctgaccttgggcgaggccctgagcctcagatgtttttgagttcccacatctggagcaggaggataatgattcctgctgcctcccagggttgctgggaggatgaagtgagtctgctgtgtgatgctcagaacagggccactgtcattatgccattctggttactagtactcttattaccattacacttattagagaggcaggatccgtgcttggatttagtagttaggattcacagggtgagtgatccataattctttgccattacgatgaggtcacatttcctttggtaaaatgttgaacacctttgtattatggaaatgttcacacatacccagaagaatagtctcgcgccctcctggggtccctgtcagcagctcagcaggtagcagctgtggccaggccttgtcgcctgtgcctgctcctcacctccctgcttatttcagagcaaatcccaaacgtcgtacagccagaaatattccacacttttccagaacaagcctgcctcagtctcctcatgcttccccagttgtcttataatcctttttttttttttgagacagagtctcactctgtcacccaggctggagtgcagtggtgcgatcttggctcactgcaacctccgcctcctgggttcaagtgattctcctgcctcagcctcccgagtagctgggactacaggcgtgtgccatgatgcccggctaatttttgtatttttagtagagatggagtctcaccatattgatcaggctggtcttgaagtcctgacctcaagtgatataaccatctcagcctcccaaagtgctggaattataggcgtgagccaccgtaccctgccataatcctttttcatttgttttttgttgttgttgtttgagacagagtctcactctgtctcccaggctggagtgcggtggcacgatctcggctcactgcaacctccgcctcccaggttcaagcacttctccctgcctcagcctcccgagtagctgggattacaggcgcccgccaccacgcctggctaagttttgtattttttagtagagacagagtttcctaggctggtctcgaactcctgacctcaagtgatccacccgcctcggcctcccaaaatgttgggattataggcgtgagccacggcgcccggcccatttgtttgatttgggtctggacaaggtctacactttgcatccggttgataggcctcttttttttgttttgttttgttccctttgttacccaggctgaagtgcagtggagcgatcagagctcacgtgcagccttgacctcccctgctcaagcaatcctcccgcctcagtctcctgaatagctgggaccacaggtgtgcgccgtcatgctcagatactggcatcagctctttggcgtgcatgttgtcgtagtttttctacaggcgacctaggccatttgtcctggagttttgcagtctggggccagctgatacatccttgtggtgtcattgcacgtgttctctgtctctgtgcttcctgtaagttaggacttaggtctagaagctcgatctgatgcaggttcagtttcttctggcaagcacgctttcttaggtggttgcttggatgagcatcagaattacttacatgtctgtatgactgtcaagttcagttttcaagtaaaaattaagttttttttaaaaaagcgagtgggttgagaagaacactctgaagtcactcctagtaaggctggtacccagatccagcagaagtagggtgggagggaccaaaggactgaggctcgggtccccccttccccaccccccggggcctgggagcaataggctgggtgccccggcttcaagtaaaccagtggcattaacatgtgggcctctggttcctgctttgctagggccacaggcttccagctgagagctgctgccacccaccctggcaaccccttccgcatcgcgtggtggtgacaccttcagaacagagtggtctcccaccccagctctacccttggctgcctgtgtcaccctgggtggctttcccagcctctctacctgcttccttcttgacagcctgatggtggccatacgtcccttgggctgtggtgactgggcctctgggagctgcccttccacttctgcattttaacataaacctccttgacctcagctgctccattctctgctcccttccagccactcggattccagtcctgggggcctcctcactgaccatgccctccaccctcagtgctgttccctggtactctgcatggcttcctcacctgtatcccgtctttgctcagacgccacccctttagagacctccctgactgtgccctctgaaagagcaccttgtcactctctgtcccttctcccacttgtttacttgtatattgtgttcccactagaatgtcaactccaggagagcagagactcttgtcttattcactgctgtgtccctggtgcctagaacagtgcctggcacctgctaagtgcatattaaggagtcgttgctcactgggtagaagcattaaaaaaaaaaaaaaaaaaaggctgggtgtggtggctcacgcctgtaatcccagcactttgggaggcaaaggtgggtggatcacctgaggtcaggagttcgagacgagcctggccaacacagtgaaaccccgtctctactaaaaatacaaaaaaattagcttggcgaggtggcaggtgcctgtaatcccagctacttgggaggctgaggcaggagaatcgctggaacccaggaggcggaggttgcagtgagccaagatcacaccaatgcactccagcctgggtgacagagcaagactctgtctcaaaaaaaaaaaaaaaaaaaaaaaaaaaaaaagaattgttgagtgcatgaatgaataaaagaaagaaaatgactgggcacagtggctcacatcccagcactctgggaggctgaggtgggcagatcacttgagcccaggagtttgagaccagcctgggctatagtgagacctctgctctacaaaacatttttaaaattattgttttaaaataatttaaaaattatttaaaatgtaaaagggcgtggtggcatgtgcctgtggtcctagctactcaggaggctgaggtgggaggattgcttgagcccaggagttggaggctgcagtgagctatgatggggtcctagctactcaggaggctgaggtgggaggattgcttgagcccaggagttggaggctgcagtgagctctgattgcaccactacactccagcctgggtgacagagcaaaacctatgatgatagatagatagatagataagatagagcgagcaagaccctatctcaggtagatagatagatagatagatagacagacagacagacagacagacagatagatagatagatagattagattagatagatagatagatagatagatagatatggttaagtgagtggactttggtcctggtcagacttgccacggaatcccagttctgatacactcgccgtgtgactgagggctgacatgtcttctctctgagcttcactctcctgcttcacacaccgtgtgaacggcaccctcctcgctgccttcttttgcaccaggatggagcctgcacgtaacactttgtagtggtctcactgctgtcctgtctccagcacggggcaccgatgagccagccagaagccgtccctgccggggggatgcttgacccaaatcttcagtaataactccttccactctgggtgaccagctgtggtgccccagggcagggacttgttgatctgggtttgttctggaggccagaagggtttcctggggactgggattggagcaggattgagagtgcctggtatgtggagagacctggctgttgtggcatgagtccgagggctcaggggccggctgcttcccggcctttgtcttccttgcaggaaacaggccaggagttacaaggggccagaggatgctgctgtggttatggtggaagttaacagctttgggaagtgtgcatgtgtgtgagtgtgtgtgtgtgtgcacttgtgctcattgtaaagagagacggtaaagaaatgaggagagactgcaggcacatgcaaatacagagaaagctttcagttgtcaggatcgctctcccggtttttcctgcatggtggtgtaaaatctgacatgtgtacagaaaagtgtgtaaaacctccatgttcagtttaatgaataattataaagcaaacagccatgaaactaccacccagatcaagaagacaggcatcaccagctccctgaaagccctctccttcacctgcccttcccagtgctaacaaaaacattctcctccctttcttttcattgttcctcttttttggtgaattgtgaaagatttcagacacccccaagagaagagagaatcacctgctgaccaccctcaggcccgctgcccagctaaaagacgaaatgcttgctgtgggtgcagcccccaggtgcctcccccagggccccaggcgtcgctggccctgcgtctgcttccctaaacagtgtcccgcattgttctgcaggattttaaactgcgtgtaaatggtacgaggccagcggcacttggctgcaactctctcaatattttgttcttgagatttctctgggtggagtaatgaagctctgtgccagaaggaatggttcccagcgggggtcagggcacccctacccctggccagaggaaagcagctctgtcctgggggggccccaggaggacgctctgggctcctctcacccaggcccgcagccccctgctccacgtgggtttgaggcggccacctccagtggaagtggtagagcgccgttggcttcctagggcaccacataggacccagttacagccgtgatgtgaaggggccctccctgagcttatgtaaggtgtaatggggcgctggtgccgcctggggcctgtgtgcaccacggaggggccttctctggaggagggcatagatcagcagctggggcaggagggcctcttctcttcccatactgccctccccctgcgcccgcccactgcccaccctcacccgccctgtttgccaggctcacacagcctttcttggagaggccctctggcggggagtttactctcaaaggctctatatctagctgacctgggattgccacccagctccgccaccttctagctggacggccctgggcatgtgttgacccctgccccacctctgttggcctcagtttccccatttgtaaaatggaattgtgtgagggttatttcatccatgcaaagccttcgtagaagctagtgtgtggaagcctcttaatgagccttagctgttagtatctttgtcatgcttgccattcattcactcatttttgttgatagtaactttttgcctcctctgagtccagccctgtcaggctgaggtcctgccttcatggagcttataatacagtgagggagacagacatggtactaggcagtgacaaaccagagtgaccttggaaagcacaggccagagtgtgacagctgtgatgggagaagacccagaggactgtgggaggccctggctccagcctaggaaatcaaggaaggcctcctggaggaggagacttcagagctgaggcctgaaagaggagcagggttagtttgcggaacattgtcccaaggagagcaaatagcatgttcaaaggctaaaagttgggaaagggtctggcattttaaataaaccattactatttttaagaaaactttaaattctgagatcattgtagattctcctacagttgtaagaagtaactcagaatggccaggcgcagtggctcacgcctgtaattccaccccatttggggaggccaaggcaggaggatcgtttgtgcctaggagttcgagatcagcctgggcaacctggggagacaccatctcttcacaaaatagaaaagcttatctggctgtgatgctgtgcacctggagtcccagctacttgggaggccgaggtggatcacttgagcctgggaggttgaagctgctgtgagctgttaatggcaccactgcactccagcctgggcaacagaattaaggctctgttgcaaaagaaagagagaaagagagagagggagaaagggagagagggagggagggagaggggggaaggaaggaaggagagaaggagagagggagaaaagaaaagaaaagaaagaaataatacagagaggaggtctggcgcacctttacccagttttccccaatggtaacacctgcgagactgtagtaccagataccagagtgtcaactgacattgacactgtcattgtcaattgacaattgtcattgtcaattgtcaatgacaatgtcattgacattgacattgtcagtcacaaggatccctcctaataccttctcatagctacacccttcccctgcccatccctaacctctggcaaccactcatctgtctattcccccattgttaggattttgtcaattcaagaatgttatgtaaatggagccacccagtatgcaccctttttgcattgactttatcccctcagcatgattctctggaggtgcatccgcattgtggtgctgatagtgactactgagtagtattccgtggtctggatgccccaccgtttgtttaaccatttcccgttggaggacatctgggtttttctaattttttggctattacagacaaagccactataaacctcgacaaagagggtttcgtgtgaatgtcagtttttgtttctctggggccaatacccagaggtacaattgctgggcagcgtgctggttgcatgttttaagaaaaccatcaaaaccattttctagagtggctgtaccatgttatattatcaccagcagcaggttccccacatcctcaccagcatttggtgttgtcactattttttattttagctcttctaataagtgtgcagtgataactcattgtggctttaatttgcatttctctaatggtaatgatgttgattagcttttcacgtgcttatctgccatctgtgtatcctcttcagtcaaaggtctcttcatgtcttctgctcattttcttattggattgtttgttttcgggttttttttttttttttttttttttgctgttgagttttgagttttcactgttgttctttttttttttcttagccccaccaggttctcatatgagatctttatctattctctctcttttttttttttttttagatggagtctcactctgtcgcccaggctggagtacagtggtgtgatctcggttcactgtggcctccgcctcccgggttcgagcgatttttctgcctcagcctcccgagtagctgggattacaggcatgtgccaccacgtccagctaatttttgtatgtttagtagagacggggtttcaccatgttggccaggctggtctcgaactcctgacctcaggtgatccgcctgcctcggcctcccaaagtgctgggattacaggcgtgagccaccgtgcctggcgagatctttattctacatactagtcttttgtcagatacgtggtttgcaaatattctctcccagtttgtagcatgtcttttaatacttttcatacggacttttgcagagcaaaagtttttaattttgtattaatttttttcttttatggattgtgcatttgctgtcaagtctcagaaccctgtgccctgtcttaggtaccaaataagtttcttctgctttttttttttttttttttttgagagagagtctcgctctgttgcccaggctggagtgggctcactgcagcctctgcctcctgggttcaagtgatgcttctgcttcagcctcccaagtagctgggactagggaggcgcccaccaccatgcctggctaatttttgtgtttttagtaggcacaggatttcaccatattggccaagctggtcttgaactcctgacctcgtgatccgcctgcctcagcctcccaaagtgctgggattacaggcgtgagccaccacaccctgcctgctttttttttttccataaaagtttgatagttttacatttaagtctgtgatccattatgagttaatttttgtacaaagtataagttttggattaaacttctttttttcccccgtttggcatgtggatgtccagttgttccagccagcatttgttgaaaatgctgtctttcctctgttgaattgcttaggcttctttcacaagaatcagttaccacgatgagatactacatcacacctactaggatggctgctgtcaaaaaaacaaaaataacaagtgttgggaggatgtggggaaattggagccccgtgcattgcttgtgagaatgtaaaatggtgctgtcgctgttcggcatagaattaccttgtgacccagcaattccgctcccaactgttcgtccaaaagaattgaaagcagggactcgaacagatatttgtacacccaggctcatcacagcattattcacaagagctaaaaggtggaaacagctccgtgtccatcagtggatgaatggaggaacaaaagatggtatacatgatggaatattattcagccataaaaaggaatggaattttgggtagaaagctatcatgtggatggtcttgaaaacattatgcttagtgaaatcagccagacacagaaggagaaatcctctatgattccacttgtacgaaggacctagagtaggcaaatacaaagagacagaaagcatgcatggagtcccagctattcgggggcaggaggatcacctgagcctaagaggttgagttcagcctggacaacatagtgagacccggtctcttttaaaatatatgtatataggccaggcgcggtggctcacgcctgtaatcccagcactttgggaggccgaggctggcagatcaagaggtcaggagatcgagaccatcctggctaacacgatgaaaccctgtctctactaaaaatataaaaaattagctgggcgtggtggtgggcgcctgtagtcccagctacatggaaggctgaggcatgagaatggctagaacccgggaggcggaggttgcagtgagctgagattgcaccattgcactccagcccaggcaacagagagagactctgtctctaaataaataaataataaaatatatgtttatgtatatatagagagaaagaaagtagaacagaggttatcagggtttgaggggaacaaggagctgttgtttattgggtacatagtttttgttggaatgataaacatgtttgaatatagatggtggtgatggttatacaacattgtggatatatttaatgccactgaattgtatacttacagatggttaacaatgataaatatgctgtatattttaccataataaaaataaatttttgaaaccagctaggtatgttggtgtagatctgtttctgagttctctgtcctgttccgctgctctgttgctgtgactgtcccaccccatctgggttacttgctgcagcgctgggagagggattcctctggcttcctctctcttttctctttttcaagattgagctcttgaaaaaagagctctgggagctggcattttggagctcctctagggttccgcgtgtagaagatggcactgtgttgggcctaggttcagagtcgtccttgacaccacctcatcctcagcccgtgtctgactcatcagcgagcattgccttttcttggtagacatagcccaggtctgtccccctctctccactgccactgtcctggctgcctcacagttgcccaaacagcgctgcctccttgtcactcatcctcacgcccactcaggccccttgattccgtccttcacagggcaaccaaagttacatctgtaaaacccaggcctggaccaggtggagtggctcccacctgtaatcccagcacttggggaggccgaggtgggcagatggcttgagctcaggagttcaagaccagcctggacaacgtagtgagaccttgtctctaaaaaaaataaattaataaaaattaaaaaaatgtaaaaacccaggcctgtccttggcacccacgttgtctccccttgctctctcatgatctgcctccaccacaccgtccccgttcaggcctgctgcccacccatccctccagccagtgtgtgtccgctggactttcacattttttgcgtgtggtgcttgactataagcctgatggggtagggcccacactgcacttctgcccccgcacaggcggcacgtgacagacgtgcattagatttctgtcggtggacgccatgaacgtgggaaggaggctgcctgtggccggagcaggtggttgggggcggagagtgtgcaaaaatgaggacagagaggtgggcgcgacctcggtgaggagacggctttagctctgtgggcctgagtaggtttttagcaggagaggatacaatcagattagatttacaaaggtctccctgacctagcagaaaaaggcaaaggctttgaatagacacttagcggaagaggacattctgatggcttttataaatatgaaaaatgctcaaccctactaaatagaaaaatacaaatgaaaactaggctgaggggggccacacctcacatatcagcagagatcagagagactggccacgccccgtgctgcaaggccgaggggagataggccctggcaccgccgaggggctgtgagtggggacaggcctcacgcagggccacttggcagtggtgaacttcactggacatttacccacagacaaacttgcacacctgtgaaatgacagctgcacacagtgagtgttgccgcaccatttataagagcaaaagacaggaaaccaccactctggcccgatggggactggctccagacatcacggtccttccacacagctgccaaagcagcaaggcagtgctctgccaagatcaaggcagggaaagatcaccaagacccacatatatatgcagcatgtctgtggtttcagttacctgtgaccaaccatggcccaaaagtacatggaaaattccagaaataaccaattcatatgttttatttatttatttttttgagatggactctctgtcacccaggctggagtgcagtggcaccatctcagttcactgcaacctccgcttcctggtttcaagcgattctcccacctcagcctcccaagtagctgggattacaggcatgcgccaccacgcgcagctaatttttgtatttttagtagagacaaggtttcaccatgttggccaggctggtctcaaactcctgacctcaaggaatccacccaaagtgctgggattacaggcatgagccactgcgccggcccaacagctcatacattttaaattgtgcaccattctgagttatcgtgattttttttttttttgtagagacgaggtctccctatattgctcagctggtctcgaactcctgggctcaaatgatcctcctgcttcagcctcccaaagtgctgagattacaggcaggagccactgcacagcctcgtgatgaaatcttgagccatcccactctgtcccgcccgggacgtgaatcacctttcttaccccacatatccatggtgtatgtgctacccatctgtggctactcagtagctttctcggttctcacatccactgttgccgtatcacagtgcttatgttcaggtagcctttatttcacttaacattgtccccaaagtgcaagagtagcgatgctggcaatttggatatgccaaagagaagctgtaaagtgcttcctttaagtgaaaaaggggaaagtattgaacctaataaggaaaagaaaaaaaattgtatgctaaggttactaagctttacagtaagaacgaaccttctatccatgaaattgcgaagaagggaaagaatttgtgctgggtttactgtcacacctcaaactgcgaaagtcaacagccacagggcataagggcttggttaagatgaaaaaggcattacgtttgggggggtggaagacaggaacagaaacgtgttccaactgatggcaatcgggttcaatgttatccacagtttcaggcatcccattgggggtcttggaacatacgccttgcagataaggggaactgctgtatatatagttggccctgggtatcatgggccctcaggatcacgggttctgcacccacccattcaaccaacgaaggactgaaaatttactatggagggccagcttttccatccgcggttatggagggctgactgagggacgtgagcatccctggatgtggtacctcctgcgggggttctggagccaatctccctcagctaccgagggagaattgtatagatatatcaatttttttctttcaaatcataattataaattgttaggatacacagtgaaaattgcataaaacataaatgtatagcaaaaccaattactataaagggaaaaatctatgtagccacccctccaggtgaagaaacagatggtgccagcctcccccaacccccaaaagctcccagtccctcccttcccccagaagcatccactctttttaattttaattttttttgagacagagtcccactccatcacccaggctgaagtgcagtggcacaatctcagcttactgcaacctccaccttctgggttcaagcaattctcgtacctcagcctcccgagtagctggaattacaggcatgtgccaccacacccggctaatttttgtgttttgttgttgttgttttatttttttgaaacagagtctcactctgtcacccaggctggagtgcagcggcaccatctcggctcactgcaaccttcgcctcccaggttcaagtgattctcctgcctcagcctcccgagtagctgggattacaggcgcctaccgccacgccacgccaatttttatatttttagtagagacggagcttcaccatgttggtcaggctggtcttgatctcctgacctcaggcgatccactcgccttggcctctcaaagtgcagggattacaggtgtgaaccaccccacctggccttaattttaattctctaaaaatgtagagatggggtttcacaatgttggccaggctggtctcgaactcctggcctcaagtaatcctcccgcctcggcatcccaaagtgctgggattacaggcatgagccaccgtgcccagtccaactctcctgacttttgaggccatcatatgcttgcttttctctctgtttgccacctctgtatgcagcctgaagcagtttccttttgcctggctttgaaccttaaagtccgaggatggagtattgttcgatgtttttgcctcttctgtgtggcgtcttctttgatgctcatccacatgtagctgtagtcattcattcattcattctccctatcatgtgcggtgccatggagccttcattcaccacctcctggggacgagcatttgtcttgtttctagtctcttctcgcgtgtgctccctgccccatgggcctgcgttatgctggagtgtgtacccaggagagctcttgctaggtcaagcgtgtgtccccacttccactcgatgctgctaagctcctgccaaatgccagcagcgtgggagagccacggaatgttttcgagaagagcaaagtacagaatattgtgtgtcatgtggctgccatttctcttgtttttttaaaaagcaggtaatcatgtgtgtacccatacacacacgtaggatctctcagaaaggaaaagaaaaaacctgaaagtctagtagcggttgcctccagggctgagctgggccagggtggaaggaggacatcctgtcacagtttaccctttggtgccttttgtcttttgaaccgtgtgcctgtattacaaagacagagagaaggaaaagaaggaaaaggggtagatgagtgtaaatgtggtaaagtgagaatcactgagaatcgcccagtgcagctccctctccgtccattggggacctcgtttcctgtggctgtccagagctgtccaatccccatccactccccgccagagcccaaacctgcccgtctggtttgcagagctgccccacgtggctcctctgcgggtggttactcgacaaatgccccaccccccaccccatggggaggcagtggcctgagatctgggacttctggatctaggcccctagacctgccctgctgtggtccagagcctggcccagcccctccttggacttcctcctcactgtgacagggggtggacagaggtggggatgggagttccaggccctgagagcaagcgctggcctcccagcccacgttctgtgtgtggagataacatctgcccttgaggagttggctgcaggggcaggggtgtgccagagcagggtagtgggaaggacccaggtgcgtctgtctgctgtgtgccggggcgcttgctcactgttgtccctggattcaccatggcctgggtgcccatcctgggtccgggcacccagcagccttggtccctaccgcctaccagactggagtccctggtagagcccctctagggtgtcaactcccgtgggcaggaagttttgtggagtttgttcagtgctgaactatcagggcctcccacaggtgtgcctggtatgtgcctggagctcagtgaatgaatgagaggcgggcaagctgcagacagtgacagcctgggtgctcagggctggcatggggaggtgcagggtggagtgcacagggctggagcccagaggatacctgacccagcctggggtggcagggagggcttcgtggaggagcaggtgcctcaagtggggccggagggtgagaagggatgaaccaagcagccctccggaggcctcgaggggaacagacagtgttcacaggagaaacagttacacctgcgagctctgcctcgggccagcctttgcactggaggtgggatttgaaggggagggaggggtgctgtggagcatctttttcttctgttcctgaacgggggttctgatcacatcagcctcatgcttggagcagctggttaagggcacagacaccgggacagacatccagcctgggagtcccagcgcctgacctcccctcgggcatcaagtcactccgcctctccgcgcctcagtttcctccatgatgaaaggggcctgctgaaggacctgtctcatttagggcagcagtgaggcaaagccccggagcccatgcctgtgccaagagcagggcctggcccagaatatggccttgtcacgttgagctgccttttttcagcagggttagtttcatcctggtgaggcggcgccagcatggcgttccaccttcttggcctcctctccctcctccctttcctgccatccacacctcccggccctattctcacacctcaggatggcgatatgggggcttcaccgtggtctcccctgacctcgcccctcccccggtcaggctaagtctcagattcctcctcatgggtgaggggggcagagtggcccctttcctccagcccatgctgggcacttgctagaatcccagccttggtcggggtggaggagaagcaagttccagctctccagttctgcctccatatcagagagcccacccacccctctccccagggctctatcctgcacctagtggcccctgtcactccccagccacccccacgtacataccctggtcccttgtttcaaacctggctgccccttagccgcctggccagccgcttgcaggtactcagccttgctgtgtagtcaccccctccagcccctggcacctagcctggcataggggggtgaggcggggtgtgcctgttggtgggaggctgaccctgctgaagcaaaggctgtggttggggtccccgcccagccctgccctctgtccaggcagctatgagccacgtggcccaggcccacccaccccagctccaggcccagccccgcctccctcccgccctccgtgggtggaaaccacagccgaggctcaactcctggccgcgtcaccaccgctgccctgcaggctggagcatagagcccaggcagccctcctcggtgggtgcccatgttgagggcctggggagccctggatctactctgctttcccagctggaagcctgtctgtccacaggcccgccccattgagggtggcccaggaagtgggaaagagcgtggtggaggtgagctggccaggcctcgggaggggagggggagggctagactggctgccagggaaggagggtctgcccctggccactggagccagtgtgagcatgtgcgaaggccacacctttcttggggttggagcggggtcactgtgtttccatgtgtgcgagatggcaggtgcctgtctgctggggacttgcaggcatctgagcataggtccctgagcctctctgtgggagcacgctcctggggtctggcttgcacgagggcagaagtttccgtgagactgtgcctcactcagtcactctgggtgaccctggagttgactgggtgtgcctaggtccatggaggtctccttgcctactgtgtgtggttttggggtcgggggggtgcctcctagtgtagctttgtatcttgggggttattcctaggtgcgtgtgtgtcctggggtgcagtgcggctttccctcgaagtcatggagtgtctgcggcattgtgtgtatacacacgtgtccctgtgtatctatgtgtggatctctttgggagtctctgcatctctgggtgcacgagtctttgcagtgtgtatgaaagggtcgcagtccacggtccatccatggctcttctggggcccatgtgcaggctggctgagccgcggccttcccatttgctgcgcatgtactctgagccaggctggctttaagagccgctcccccaccttctcccactgaagtctcagaagctccctctggggcacgctctgctggtgccccatattctagagacatgaacggaggctcttggtaaatgtccttttcccctgccccacggcaagcaaggcactgacccctggccaccagcctcctgagcccatggtcctgtacgggccgccgcgaggtgctcaggatgttgtagggttgagggtggattgctgctgttgccggctagccgggaagttttctttttttggcctaagataaatattggagaagaatggcccgggagctttccatgtgaccagttcatgtgcctggaggcctgtggtttgtgtggctgggtatgtatctgcatgtctgtgtgatggtcttaggactcggctctatgtggtgtcagctgcggacatcttgcatgctctggcatgtcctcacatgcatctgtgtctagggatcatgcatgtgtgtatgcatgtgtgtgagtgtgcatgtatgtgagcatgtatttgtgagcgtgtgtgtgagcatgcatgtgtgtgtgtgcatgtgtgtgcatgcatgtgagcattgtgtgagtgcgtgcgtgcatgtgtgagcgtgcgtgtgtgcacatgtgtgcatgtttgtgagtgtgcatgtgtgtgagcgtgcatgtatgtgcatgtgtgggtgtgcgtgtgtgtgcatgtgtgtgcgcgcatgtgtgagcatgcatgtgttgcgggatggcttcgctcgctgctgtgtgttgggtctgtgaggagaggccgtggttgctgcctggtgtatgtcctggcgtctgtgcacggccttgtgtgttgcatggcaggggaggtagacagtgagagggcttgggtgctggagcctgagaggggcagggcctctttcctgccacatcacccccttccccctgcccagcctcaggcgaggaataaatgacgtctgctctgatttcccaggccgtatgggctcccacacactctctgttgtggtgtccatccccaccctgagtacctctggggggtgaagggcaccagcagtgccctttgtgtctgtgcccttttgtgctgggccagattcggggcaggagggcttggccctggcatcactgggggctctgagcgccagcctgggcctagctgggtaaaggaagcatcatctcttcgttgagccacactctctgcgctgggcaagcctggggacacagagatggccccaggccctgccctcctgggtctcccagtccagtgggagaggcagacctgttatcagacaataacagcccatcaggctcctccctcccaaccctggagaaggtaagactagcatatttgctcggcagaagggaccatgcccggcatcctctgtagtgtgtttgttcattcattcattcatcattcagcagcaagaatggcagtaatgataacagcagcgagcctgcagtgaggccccactcggcaccagtcactgttgtaaatgttttacatgtgtcgtcttattcgctcgtccaacatgctcaggaggtagggactatcactacccccagtttgcagatgaggacactgaggcccagagaggttgagtcacttgtccaggggcacacagcttggagtagtagagccagtacctgggactgggcagtcggctcttaaccaccagtacaggcctgctgagcccctgtactgcgccaggcctctgctgaggacaaagcagtggctaggagagacaggccctgtcctcgtggggctgcccgttcattgcaggagacatactaattaaggactataaggacaaaggtaaaattacagctgtgacagatgctgtcaaggggaaggcacgggacatgcagggtttttttcagacagagtctcactctgtcgcccaggctggagtgcagtggcgtgatcttgactcactgcaacctccgccccctgggttcaagtgattctcgtgcctcagcctcccaagtagctgggactagaggcacatgccaccacgcccagctaatttttgtatttttttagtagggatggggttttgccatgttggccaggctggtctcgaactcctgacatcaggtgatccacctgcctcggcctcccaaagtgctgggattacaggcatgagccactgtgcccggccatggacctgcagtttgaaggaagaggaagggataacaaggtgaaggttgagggggcagggggctcttcaggacccaggctaagggcacagtccatgcagaggcctggtggcggggacggcgctatacctggaggaacgaaggagagcagggctgccccctccaccctccacagacgctgctgaatccaggccccacttccaaaggcgtcccccccactggatctgtgtctttatgggcttttacccattgtgggggctcatggatttccagaggcaccccccatgtgatttggcttttgccaggatacgctgccacttcctgagattcccagcgtaggccatgtggctgggtgggcccccctgcagtggggagggcctgggcgttcacagtgggggtaccttttgtggtgctgggacacacaccagcttacttgctgaacagccagattcagtctctgaagacccattttctccccaggcgtcaaggtcagacttccagggagtgagtgtacgaggcccagggacttgtgtctgtctcggccccatccccgtgccctgcgcctcctcagggaccaggctcattactttggtaatggcatcacccatttgttccacagatatgtctcgagcacctactgtgttccagccactgctctagatgccggcaagaaccagacagacagacaggtccctgccctcagggcactgacattctgctgggggcactgccagtcagtaggtgtaggatgccagggggtggtaagtgccacagagacataaaaagcgaggtgcacattttgttcaggggtcaggcagcctctcggaggaggttttatttgcactaagacctgaatatcaagaaaggctgagcagtgcagttctggctgagggaagataggtgcagaggcccggaggctggaacagctgtgatgagtccaagacatacacggaggcagccagcgcggctggagagaagcgaggggaggagatgaggtttgcgaggttggcagggccctcccagtcagggccgtgttgaatcagtgtttgagccaaagtgggaagccctgtagaactgtgtgtgtacatttgtgtaatgtcttcagattcccttctaaccacggtggcttttctggtcttggtctggtcattgtcagggacattgtcccttcctgtttttgtcccataaacctccaaggtcctttctttagagtggaggccttggctggagccgggaccactggggaacaggaggctgggggatgttgacttgccttctctgtgggacagagtggctgcttttgtgacctggcactggatagccctgggcagtgagttcccctctcggcctcagtttcctggtttggggaacaggaaggaagaggactccccacccagcacccagcactgtttagagggctccgcgtggcctggtctgtgtgcctggcacagcctgggcaagtccacagccacgaaggggagcccttgtgagtccacgccctgctgtaggcactgaaatgcagccatcatgaaccaaaacgcggtccctgtccatatgagtcactgacttagcgaggaagatggccacagacaggcaaacaactgtaatgtgtgaggcaacgctgagggccctggagggaacggacctaggctgactgcgccaggctccgcgccaggtgctgggggtgccacatggagcaagaccaggccaagcccctgcctatgagctcacgctgcagccctcggccagtcctgccacctccacctttacagtgtgcccagaacctgctcatgccgccccctctgcagcccccacaaggtcctgcccccttgatttccactgggccatcacagcctcctcctccctggtccccctttccgttctgcccccacagactgttcccagccagtgggagcctgtgaactcctgagtcaggcggtggccctcctgggctcagagacccctgcaactccgtctcactcgggaaaggaccaggccctcccggtggcccccaaagccccacacgatctgccccattacctccttggcctgtccttccacttgccccctcgcccaccctgctccagccacgtggcctcctcgctgtcccttgaccatatcaagcaaattcctaccgccctggctgttccttcctcctgggctgcccttcctccagagccctacatggctccctctcccctcctcacgcaggtccctgctcacgtgtccccttctcagcaaggcctgcctgaccactttattttataataatagttattattattattttgagatggagtctcacactctgtcgcccaggctggagtgcaatggtgcgatcttggctcgctgcaacttccacctcccaggttcaagcgattctcctgcctcagcctcccaagtagctgggactacaggcgcctgccaccacgccaggctaattttttgtatttttagtggagatgggatttcaccatgttggccaggctggtctccaacttctgacctcaagtgatctgcctgccttggcctccaaaagttctgggattacaggcataagccactgcacccagcctgttattcttatttttgagacaaggtctcaccctgtcacctaggctggagtgcagtggcacgatcactcactgcagcctcgacctcccaggctcgggtgattctcccgcctcagcctcctcagtagctgggaccacaggcgcacaccaccacacctggctaaatttttatttattttttatttttggggtagagacagggtctcactaggttgcccaagctgatcttgaactcctgggctcaagcgatcctccctccttggcctcccaaagtgctgggattacaggcgtgaaccaccgtgcccggccttgaccactttattgagaattccagcctcccctcccctcagctcctttctgattgctgcgttattttctatgtcagcatttctcacccgacttagtagatgtttttctgatttatctcatacattgactgcctccttccttctagaatgtgagtgctgcgaggacagggatgtttctgactgttgggtgcactgctatgggccccaggcccagcagagtcagcccttggtagacatggacgggtgcgtgggtcgatgcgtgggtgggtgtgatcgggtcacttgtgggtggagtaggtgtttgctaaggcagactctggggatgtgtcggtcccaaacctgaggactccttggaggaacgaggctcagtgtgggaggcctgaagagagatgtggttagaggagggttgggggccgtgcaggatgggggcaagagctaagccaaggtttggaggcaggaatggcttgggggactcaggacagcgaggagcctgctgtgccgggacgggaagccaaactcccagcgcctccaccatcaaagcacatgccagaaggtaggaggtaaactgaggcagggaggggccctcccagagctggtaggtgaagattgtggcagggtggtgagtgggacccaatggtggaaggctgagtgcaggctggaggcagtgagcggtctgggtccccttcctgattcgagtttcattttggtaacgatgaaaggatgcctgtggtcctggccacctcccctgctctgcccctgggcccctgtgttctgggtgggccagccccctcccttccaggggcagcagctttgatcagagcctggagggggcggggcaggaggtaagggtttttgcacgctcacgtctgctgacactgacagctttgtcgcacggtggatcttgcttttccatttgggccagttaaccttgtgggggagaatgggggtggtgggacccttttcctcccagaaaaggtcagaggatgcagggggtgactggaaaatctgaagtgtctgctaggccaggtcaacgctgcctgtcccgcatgttaaagaattcaaaagattttttaaaatttgaaataaacattttagagtaggatacaaaatgcgcttgcatttctgggatcaaatactggacttcagaggcatctgtgccccggctggggcagaaggctgcaccttcctgctgctctgggactactgcccccaggtcccagctgcttatctgaaagatttcccgggtgctgctgggccttgtccaaggcctctgagcaggggaataatgcagcggacagggacgatcattccacggagtccctactgtgtgctgccctgggctacgagggggtaagacagaggacagtccctgccctgtgaagctgacacattctaagggagaggcagatgctaaagaattacacatatggctgggcccggtggctcacgcctgtaatcccaacactttgggaggctgaggcaggtggatcacctgaggtgaggagttcaagaccagcctggccaacatggtaaaaccccatctctactaagaatacataaattagccgggtatggtggcggacgcctgtaatcccagcttcttgggaggctgaggcaggagaagcacatgaacccactaggcggaggttgcagtgagccaagatcatgccattgcactccagcctgggcaacaagagtgaaactctgtctcaaaaaaaaaaaaaaaaaaaaagaattatacacacacacacaagcacgccatatatgtggtaagagccctgaggaaagataaagcagagacaggtgtagagggcgacaggacaggagcagggcttgtgagcacaggcgggcctgggaagtcagggaaggtgggagatcagtgagaggagagttccaggtggggcactcgcccatgcaaaggccctgaggtggaaccatgtctaggatttgaggaacagcagggggacctgtgtggccagggcacagtgagtacaggggtgcttgggagaagaggagggcagcatggtgatgggcgcatcctgtggggactctcaggccacgaggaggcattttgggggccagcaaagggtttaaggctgtgaactctggagtgggcaggactctggaatgggcaggactctggcttccaggcccagctctgctcggtgagcttagtgagagattttacctttgtgagtctctgtttccacagctgcaaaatggggctcagaatggccactccaccgtggttgagggcgcctgcgagctcagcgtcagcgtctgctctgggccatgggtcccttgtggtggtggcgatggtggtgggagtaccgagctgagcctcaggccacatttggtgggaggggttggttttaagcatctttcctgctgcacaggcccatgggaaaggctggtgtacagccattggggaggtgggggccccggggcccactttgtgcttcctcccactacccgtggggtccaggacaggtcacacaggagggagggaccctcactcagcagagactaggcaggagaggaaaggcaaggtctgggtgtagacagaaagaatgggaacggagggagaggggaggccaggaccagccttgagaggatgatgatgatgatgataataataataataataataataaggccgggcgcggtggctcacgcctgtaatcccagcattttggaaggccgaggcaggtggatcatgaggtcaggagatcgagaccatcctgcctaacacagtgaaaccccatctctactaaaaatacaaaaaaaaaaaaaaaaaaattagccgggcatggtggtgggcacctatagtcccagctactggggaggctgaggcaggagaatggcgcaaacccgggaggcggaggttgcagtgagctgagattgcaccactgcactccagcctgggcgacagagcaagactccctctcaaaataaataaataaataaataaataaataaataaataaaataataatagacaaaaccaacagtgtcacctcagccctccagggcagcaggacaggcaggtaagagcccagccttcagtgccttccatacacaaccgcccaggttcaaatcctggctgcttctcatgtctgcctctcactggctgcttctcctgtccatgccctggacaagggccttcccttctctgggcctcagttttcccattcatgaattgggatgaggatgcttgtgaggatggaacgggattagacgcacagcagggccggaacccgcgaatctctgcagacaggcctggagtctggtgtccactctgccaccctagctgggccacctgggttaatgaggtccccctctgtgccttgttttccctgtctgtaatccggggcttattaatggcccctccctccaggatcatatgtgggactccgggtaaagtgcctggaagagggctggtatacagtaggtactcagtaagtgctggctgctattggaatggtgaccggcacttactgagcacttactgtgtgtgtgatttgccttggttctgatcccaaccactgtctctgggccaggccctccgtgccctctgttctgcgtaattccttataaaaactccaggaaggccaggcgcagggctcacgcctgtaatcctaacactttgggaagccaaggcagatcactagaggtcagaccagcctggccaacatggtgaaaccccatctctactaaaaatacaaaaattagctgggcgtggtggcaggcgcctgtaatcccagctacttgggaggctgaggcaggagaattgcttgaagccgggaggcggaggttgcagtgagccaagatcgcaccactgcactccagcctgggcgacagagcaagactccgtttaaaataaataaataaatactccacgaagcagctactattatcgccgtctttgaacagaggaggaaactgaggcacagcgtggctgagttgctcacccagggccacatattgaggtccccaggttgggttagagctccagttcacagacacagaaagtgaggtcatatagggccagtcgtggcagccctgctggggtttggagccctaggcagcctgactgccaagcttggagctggcctgggagcccagcccccacccttccctccctgcacctgggcaagcccagcctttctgcctagctcttctccctcttcccaggcctggcacggcctctgtggcccccatgaggtcaggagcatctgttgggaagggagcgcctgctggggaagccggcagggcttggagctgcacaggacggcccagggtggggtccctgcctggtcattataaacatgttcagttcctctgtttgtcctgccctctgtgcagtgcccagagggaaggggtggccccaggcaaatatccggaggcgtgccccttgcccccttcccttgggggtttatgggtgggagggcaggaggccaggcgtcggaggacatcccccagaccccatgctgccagctgggccagccgcccgccctccaggctgctcttgccccgtccccaggtgtcccccacctcagggtctgccccgctgtccgccctccgggcttagtgaggggtcacatggctgatcctcttcccgtggctctgggaactgcctagtgccccgcagtggggagggagcgggatggggcggggcgacaggttcacgatgaagaggcctgggctgggcatggggccaaagggggtggagggacatctgggaggacggagaggccggaggacatgggacgcagatctggaatgacagcaggcagagtgggcaaatggggactgttggggtatgtggatgaccctgggagctgggcctagaaagccatgagagagtaggtcagggccaccaggggtgggctgggctggaaggccacgagggaggggtgggcagcactcagggcgccagcattgggctcagagaaggggctgggcagagacaaaggaggccccccgtccgccctccatcctgggccccagggcaagcagggaaactgggccaaccctgggagccttggccaggcccggctctgaccacccgctggcctcttgggaccagctgagacaggttggctgccgggcccccacccccctcccacggggctcccgctgccaaaccggttcccctggctggctcccatggatggtcctagctctgggcagggcctcacctttcccagctgctcccaggaaggcagcctgagccgggaggagaagtaggtgtggaggggctacgtgcatctgcgcgtcctctgtcctctcactagggctacaggacttgctgtgccacgcgctgtgccaggcgcgggggagccagctgggacaagacagaacagaaactccacctgcatgtcccctcgtcccctggtctcaactcttcccctcttcctggaagccttcctgctgcccaccccgcgtccctccagactgggtcccgtgctcccgtcccccagccctgaccaccctgggcagctgctgcatggggacaggtctgtctgccccacacgaatttcccatgaggtcaaaggctgtctgggtcactgcagtggccacagaggaggcccattgctgagttattcccaaatgaatgaatgaatgagtgagtgaatggatgcattcctctcattttacagatgagtaacccgaagcccctagaggagtggtcacctgcctgagggcacttctgtcccaccagcatcagaccaggtgtgtgcaggtgtgtgcgactccagggcccaggcccggggcagctggggtggggccttaggggggagcaggacctgggcccctcctcccacaggcactgtgggagccgccccagccatcacagtggtccccaccgataggccccccatatttgcccagccctgcaccaagctctttgctcccagtcacccattacccctcgcagcagccctgtgggggttcatccacagcacagagaggttgtcacctgcccaaggtcacggcagcatgtgatggagagtcgaactctggcctcttggctccccctcccatctttctccaggctctctatgggatgccgccatcagaatgtctcttcctcagcccctttgttttttaaagtggctttggtcgaccatttgctctgtgcttggtactgtgtcaagggcccgattgaagaccacagatcctaaagataggggagtgtcgcgacaaggctgcctggggtgccctcttaacccaggggatcagtaaccctgtgctgagtcaatatccaaaggtgtgggcgtccccagcccagactcatggctggaccagtggcagtggccaggccatcagtgaccgtccatccagtacacaccatgtaccaggcatagcaggggatgtggggaagcggggcagacgagacccagccagaatgtggcactgacactctagcggtgcggtgtggatgctgcactcatgaacctaagaaggaacaacaaacaggatttccatgagttccgggctgtgactgtgatgtagagcggggggacggcgggacacggggctctttgccttggggtggtcaggaaaggagtcactgctgctctgagaactgaaggaggggacggggagccctgtgcagacactgggaagtgagctcctggcagaggggccagcccgtgcaaaggctctgaggtctccagggggggtgagaacagagaggtgatggggccttgtgggcccgcaggagacagagcggcaggaaagttctgagcagagggacgtgaccgctcgggtgctcacgggtaccctctggctgtgtgtgccacacagatgggcgcagggggtgggcagggagacccagaaggaggctactgcctcctgttggtcccggtgtaagatgaggatgggagggacagagcaggggcagaggaggaagagacatgggcaggctctcactcacccaccgtgattccctcccgcaggccgcaccgagtccccggcaccatgtttgggaagaggaagaagcgggtggagatctccgcgccgtccaacttcgagcaccgcgtgcacacgggcttcgaccagcacgagcagaagttcacggggctgccccgccagtggcagagcctgatcgaggagtcggctcgccggcccaagcccctcgtcgaccccgcctgcatcacctccatccagcccggggcccccaaggtatgtggcacccaccaccacctcccccagcccaccccaacccccgagtggccctggccctcaaccccacactcgaccctgtgaccgacacctcctcactgacatggaaatggagacaaaccccagccttccacccctatcctgggtccagtgctggcctttcaccctccacccactggctccaagtcctaagaacccatgccaccccaacctgagcctcccccacggcccatctgacagcccccacaccagcctccaagctctgctgtctcccgcagactcatgtcccgggggccatgctgctgtaccccggaccacactcctgtctcacccaaccttgagcctttccagagctcctggcagtggaagacagacccattcccagagggtgacagccccaagtggtcagggcttgggtgggggagcccggaggaggcacctgacacagaccaggggtccaggcaagcttctgggaggaggggacaccgaggcagagcccagggctgaggaggaggaggagaaattccagcagatgctggggaagccgggctttagtggagaaaatcactcctgtgaaacgctgggggctttttggttttgggtttttttttttcttcctgccatctagagcaaaatggcaaggttgggatttgaaccaatgtctgtttccaaggcccgtgctcttaacccctctgctgcctccatgtgaaatcataagagttgtggagccggtgtctgggtgtggcctggcatgaggctggcctggcctgagcccgtgctgggcctctgaagccagccttggagcctggactctctcccatggtcagtggggaccaggaggggccgcaggccaaggggaactcggccaggtttgcatccagcgggtggagatgggtgtgcctggggactcaccctcccggtgcccagcccagcctggcggggagaagccccaaggcccacaagttggccatagacacaagtgcagcctcaatgtggtagcccactgaggggtccgtgtggtccttgcagggtgcttttgaatgctttgacttctttgcctccactgagaaagtgacagacttcacttccaaagccgtttctggcatctggtgacagaccagctggaggcgagtggcagctgcctccacgggcagggcactggctcttctgggccacaggccgcacccgacccacctcagctccacgccctgcctggctctgtggccacttgcatgtaggctttgcccccaccaaggtgtctccaaaaacccagcccctgcctggcttgccagatgtgaggcctgcctgtgactgtcccagcaggaggcagggcacttgaattcacacatggggccttgtggccagcactgtcctggggccccataggcacttgtgtttgctgcccttgaccgggcctcaggcctcccaggaccttctcgactccctgttggtttttttttttttttttttgagagacattcctgctctgtctccctggctggagtgcagtggcgccacctcggctcatgcaaccttcgcctcctgggttcaagcgattttcctgcctcagcctcccgcgtagctgggattacaggcgcccaccactatgcccatctaatttttgtatttttagtagagacgggttttcgccattttggccaggctggtctcaaactcctgacctcaggtgatcctcagcctcccgaggtgctgggattataggcgtgagccactgcttcttgcctcaacgccctgttctaacagcaaagtctggccttgtgtccaccttgacttcctggggcccctgggcaaggcccggcttcaggcagacagccacggccaggagagacagggcagcggcagaccacggattttgtgggatcagtgttttctacacgttacaggcaggcctctggctggaggatgcctggcagccccaggcagggtccgggtttcgtgggatcagtgttttccacacattagaggcaggcctccggctggaggacatctggcagccccgggcagggtccttgtcagcagggcccacgttctcagctcactgtggcctttgcacagacacctcactcactacgtggtttagcaaaagttcactgagcccctgctgtgcgccagatgctggtctaggtgctgagatggagcaggacccgaagcagacaggaaaaaacaatccctgcccagagcatgcactaggcagagccgggagcagacagatgcctgtgtgctctgtatcagctgctgttaggtgctctaggtagaatgcaggcagggcaggggccggggagggcaggggctggcattttagatgatgggaggccagcagaagcctcactgagaagctgagttttgagcaaagacctgaaggagtggagggagggagccacagggaccctgagagctgatgttccaggcagagggagccgccagcggagaggccctgggcgcaggggggcgggggtgggggagacacccgtgtgtctggaaatggaacgggggcagagggggcctgcaggacacgactcagaccacagagggtggggaccgggtgactcgggatgcactggatgctctgcctggtccccatctgcatttgcatttgccacccggctcctgggacccccttgccctctactttgggaccaggcctttctgactctccctgtcccccactccttgttgttcatgggagcagagagtgtggttttggggctaaggaacactggcgcccacatgggaggaagtgccaggccaggccctggccccagcgccctgtcatttgcagccctcggggctgattatggggtgggtcaatttctgcccttcctcccccaaacccctcagggcaggactattccaccagtgtgaggaacaggagaaaaacaaggggggcctctccagggtcccaccgagcccagggggcagcagcctggccatggcgatcactcctctggcccctgcagctgtgtccccagggaggggaggggctgcactgcccatgccattgtcactccatggcatctcttcattgcgtctctgtcttgtctctgtgtgtgtcgtgctgtcctgtccctgcgtgtcggatgcacgtcctgtgtgccccactccttgctgggcccccacccaccattgcctgggaccccagaccatcgtgcggggcagcaaaggtgccaaagatggggccctcacgctgctgctggacgagtttgagaacatgtcggtgacacgctccaactccctgcggagagacagcccgccgccgcccgcccgtgcccgccaggaaaatgggatgccagaggagccggccaccacggccagagggggcccagggaaggcaggcagccgaggccggttcgccggtcacagcgaggcgggtggcggcagtggtgacaggcgacgggcggggccagagaagaggcccaagtcttccagggagggctcagggggtccccaggagtcctcccgggacaaacgccccctctccgggcctgatgtcggcaccccccagcctgctggtctggccagtggggcgaaactggcagctggccggccctttaacacctacccgagggctgacacggaccacccatcccggggtgcccaggtaacccatcccccgccccagggcccccactgtcccctgcccgttgctcctctgtccccaccttccagccccgccccaccaccgtgcatctcatcctgaccacccatgtgtctgtcccatcgctgggtctctctcctgcttagggagcagagctgctccctggcacccatcactgacagctacctctcttctgtttcagggggagcctcatgacgtggcccctaacgggccatcagcggggggcctggccatcccccagtcctcctcctcctcctcccggcctcccacccgagcccgaggtgcccccagccctggagtgctgggaccccacgcctcagagccccagctggcccctccagcctgcacccccgccgcccctgctgttcctgggccccctggcccccgctcaccacagcgggagccacagcgagtatcccatgagcagttccgggctgccctgcagctggtggtggacccaggcgacccccgctcctacctggacaacttcatcaagattggcgagggctccacgggcatcgtgtgcatcgccaccgtgcgcagctcgggcaagctggtggccgtcaagaagatggacctgcgcaagcagcagaggcgcgagctgctcttcaacgaggtgcgggcgctgctgccctgccgccctgctggtcctcccacccctccctcccaccctccctcccctcctccctcctctccctgcactcctccgtgctgggccaggctcccctcctcccctcactcttctccctccccaggccgtctcgtccgccccagctgggtccctgcctctgtcctcacagcaccctcacccacatctctgtccctgagccccagacccagggttcctcgggccactgacccccgacccagtgtcttccaggcccctcgcacccactgaggcccgcctgggctccagggtacagtgtcctccagacctgcccctcctgggttccctgtgccccgccctggcctccactcctgggtgtccctcggcacagcccacacaaccaccaagagtatgtttctgacgttcaggcccaccccctccccgtccctccttagagaccctggcagtgccccgtagcaccctgacgataggaagcccaggtccctttgccgggtgtgtgaggcccctctcgaccccgttgcccatcacagtgccgggctgcaccatggagctcctcgcctgggttcctcatcctcccgccgacacacgcctcttctctcatccttgcccttgtccgggtctcagccctgtgattgaacgctctcttcccacctgccccccagcactagcccaggactgacctgagatgggcgtgtgcccaggggggcgcgcccccagaagggaggcgtgggcttcaagctggctctgaggcccacgtggctgtggcagtaggggagggcagtccaggtggccccagtgagcacaagcttaatgtggaactgcagggggagccaggggggtggcggtggctgggtctggcactggcagccctcccgcctccctccaccactgacccagcccctgcacaggtggtaatcatgagggactaccagcacgagaatgtggtggagatgtacaacagctacctggtgggggacgagctctgggtggtcatggagttcctggaaggaggcgccctcaccgacatcgtcacccacaccaggtatttctggggcctcagacccctcctgtgacacgaccaagtcccctccagaccactaggggtggggccacatctccaaaccagctgtgctccgggcccctgggatggggtcgtgtcttccattcctcccactccagagtggggtcgagtggtctcagattcctcccactgcaaggcagggctgcgtccccctcggcaccccggggtgctgtccagctggctgctcaccccccaccccaccccgcaggatgaacgaggagcagatcgcggccgtgtgccttgcagtgctgcaggccctgtcggtgctccacgcccagggcgtcatccaccgggacatcaagagcgactcgatcctgctgacccatgatggcagggtgaggggacgggcggcggggtacgggggcggcaggtttccggctgcggggcttccctgcctcttcccatcccctgtgagggtaggtgagctctgacccccaggtctgtgtcttgaggagctgggaacttcgtccctccctggtggagcagcccagagtcaggttccagctcagtggggactctgtgcagtgggagggcacaggctggcgggggctctgccatcagcacaggacactgggcccaggggcagggatctgggcagacagcgcagcccccgccacaggcttcttcctccactgaaaagctgctccctgcccagcacccagggcggtccatggaccccagtcctgtcttccatgctttggactgaggttccaaatctgaggctgtgacaattataacgtcgggtggacatgattttctgtgagagagggcccttgacttgaatgaaatgcttgcagaagtggatgactccatcccctcccccaaggaagattaagccacaccattagtccaggcagaggcagagagagctctgtgtcactgacagtctgaaaatctccagatgtctatagatgtgttttgggggcgatgtctatgggccacctgagattgtccacacacggttgtggggatgtttgctggaggcaggaagacccatagaaatcctcaaaaatcggaaagggacccacagttcctaagaaggtgtgagaggcctggttgtcgcaaaggcaggctgtgtcccctcacggccctagtgcagggctactttctgctccaaccgaactaaagacttgttccagggcagcagggccccagggcacaggcttttggggccacccctgttcccagctccggccctgcctttgctatctgcagtactcaggccagtgtccccaaaagccccagaggctgtcagggagggaaatggggggatcgtgggggaggtgacttgcccgagggcccccaccaggaggtggtggagctccccattggtctggctctagaccccagctctgaccctagaccccagctctgacctctgggccgcacattgtgtctgaagccaaggaatgacgcaggcagacgcccctgctcgccctcctgctgtgccagctcctctgaccccactgcctctgccctgtcccaggtgaagctgtcagactttgggttctgcgcccaggtgagcaaggaagtgccccgaaggaagtcgctggtcggcacgccctactggatggccccagagctcatctcccgccttccctacgggccagaggtgagccccggggtggcttggttgtcccgccgtggacagcgtacgctgccattttccagctgcagcgctggcgggagatggggcccagtctggggagtcattgccaggaatggtgctctggacaaggaggtactgcaggcatgcatgtattcattcttcttttttttttttgagatggagtctcgctctgttgcccaggctggagtgcagtggtgcaatctcagctcactgcaacctccacctcccgggttcaagcgattctcctgcctcagcctcccgagaagctggttttacaggcacccgccaccatgcctggctaatttttgtattagtagagatgggggtttcaccatgttggccaggttggtcttgaactcctgacctcaggtgatctatccgccttggcctcctaaagtgctgggattacagatgtgagccaccgcgcccagccttggctctgccttctgagcattgttttcacaggccggctttccccttgtgggagcagagctggtcccggcagctctgggaagtgtctcccacctatgggctcctctttttccctgggtgttttgggtaaagtccccaggttggctctgattggctcagcctgggtcctgtgcctgtttctgaaccaatcactgtgtctccactgtggtgatgaggccgcatgggtcctgaacccaccagtggatgctacctgggctgagggagggaggacacctgggggcagttgacagaaagaagaggggtgggtgctgggggggcagctctcttgaggggctccctggaggactagtgctctgtggactgctggctgggtgcccaagagggagttctgggccaaggactccaggagccagaggcagagacagcgctggagcggtccctgcctgaggcctccccaggacccaccatcccccaacagctcagccctgctgtcccttctcccgccccaggtagacatctggtcgctggggataatggtgattgagatggtggacggagagcccccctacttcaacgagccacccctcaaagccatgaagatgattcgggacaacctgccaccccgactgaagaacctgcacaaggtaggcccctccctggctgggaaactgtgcgccagctggcgggtggcagggctccaggtggagcatggggtgtggatgggatggggacaatgatggcgcctgggatggcgcttactgtgtgctgggccccccacccccgggcctcatgtgtctgtgcagaccccctctgtggggcctgggcgacagaggcagcagagccacaggccctctgcaccctcaccattgccctgggccccacccagccctagagagatttgcacgtttagaagtggaggacagggccgggaccttcctagtggaggacttgccaggagggaaaggggcacctctgggccccagttgctttcagcttcttgctaaaccatggaaatagggagtacatgagcccccagggtttgtcacttcctctggggccacatagtaagcgccatcacaggtgccatcactgtccctgtcccgtctacaccccaagatctagacacccatgacctccgccccctgccctcctgcacagtacatgccgccagccgacttggcagaggcggacactgcagccctacagcaaatgaacagtggggagcctcgccccctgaccctcccctccttctcgacaggtgtcgccatccctgaagggcttcctggaccgcctgctggtgcgagaccctgcccagcgggccacggcagccgagctgctgaagcacccattcctggccaaggcagggccgcctgccagcatcgtgcccctcatgcgccagaaccgcaccagatgaggcccagcgcccttcccctcaaccaaagagccccccgggtcacccccgccccactgaggccagtagggggccaggcctcccactcctcccagcccgggagatgctccgcgtggcaccaccctccttgctgggggtagatgagaccctactactgaactccagttttgatctcgtgacttttagaaaaacacagggactcgtgggagcaagcgaggctcccaggacccccaccctctgggacaggccctcccccatgttcttctgtctccaggaagggcagcggccctcccatcactggaagtctgcagtgggggtcgctgggggtggagagaacactaagaggtgaacatgtatgagtgtgtgcacgcgtgtgagtgtgcatgtgtgtgtgtgcaaaggtccagccaccccgtcctccagcctgcaaggggtgtctggcgccttgcctgacacccagccccctctccccctgagccattgtgggggtcgatcatgaatgtccgaagagtggccttttcccgtagccctgcgccccctttctgtggctggatggggagacaggtcagggccccccaccctctccagcccctgcagcaaatgactactgcacctggacagcctcctcttttctagaagtctatttatattgtcattttataacactctagcccctgcccttattgggggacagatggtccctgtcctgcggggtggccctggcagaaccactgcctgaagaaccaggttcctgcccggtcagcgcagccccagcccgcccacccctgcctcgagttagttttacaattaaaacattgtcttgttttgtgtctgtgtgcgatgtgtggggggcagggggccctgcccggctgtcttgggtgggaatttgcagggagagggtctggatctgggagcaaaccacgattccagccaaggcagggcaagggtggggtggggagtggggagttcaggtcatagcagccagtaagctcccccagcctgccactccccagaatggggcaggattgtccccacccctggaagcagccagtttgccacagtccatgtgcagactgatcccagtttgccaaatctgcaatttcctggaaccttttaaaggctgtcttgagcgcgtttggtgagtaggagctaacccaagttagtaaattgaaggccatttggcaaattggtcagtgggcagatgggcttttggggattgactgaggctgactggcctggagctgctggcttcggagagacaccctgtgaagtgtgtccttccacgcaggagcccagagccgagcccacgctggggggaatctgactggcatggaggtggccatgccaccatcgctgctgcagctgcatcctggcactttgcgcctcaggccctgttgggctccactttctgcatcctccccagcccccagggaggcagtggagtggggagagagccaggagtgagcctccgtccccaaagccagccaggcgtcatcagcaccagagacctcagcctggtcctctcgggaagtgagtggccagggcagagattccaggttagtccacgcctcccacccttcacaggtcctgaccccaagaatcagagcactgtgtgtgtggcagggcctatgccaagtgcaaacacagcctagatggatcatcacagagtgaaacccagcggtgcaagcagctgtgctctctgcgatgtattggaggcttaggtgaggtggatgcctttctggaaaaaaaaaaaatgctaacattggcaaaagaagaaatagaaaacaagaccaaaataactgtctcctcactgcacacacactccagaataaataaaaggtttcaggcttgaatgcactttcaaatgagattttttttttttttttgagacggagtatcgctctgtcgcccaggctggagtgcagtggcacgatcttggctcactgcaacttctgcctcctgggttcaagcgattctcctgcctcagcctcccaagtagctgggattacaggcgcttgccaccacgccaggctaattttttgtattttgagtagagactggatttcgccatcttggccagactggtcttgaactcctgacctcgtgatccacccacctcagcctcccaaagtgctgggattacaggcatgagccaccatgcctggcctcaaatgaggtttaccagactttgaaggagcaggtaattccttctaccttgtgaacaagttgttccagaaagatagcagctcaggaggcctctgtgaccatggttccagacccagataaggacggcaaagaacagagcatctcagaaacgcaaggctcacagccagggtgcccggcgaccccacgggcactgagaacagctagctctaggagctccactctcctgctgaagaaaccacgggctcagagacggggagctccctcgcccagccacatctgtgaccccacggtaactctgctggttttggtgccttcagtcactcactgcaggtttgttttgttttgttttgttttgagtttttttgttttttgttttttgtttttagagacaagatgttgctatgttgcctaggctggtttcgaactcctggcctcaagggatcctccctccttggccccgcaaagtgctgggattacaggcgtgagccaccgtgcccagcccgctcactgcagtttgaaggcatggctttgggtggcgtggggtgaaagctgcccgaggccccgttcctccccacgtggctgcctcctgccagagccagtcaggaaaacagaccccaactagagttgtttcaaatggcagggatttggtaccggtggttggatcatgacaaagctctgagaaggctggaggagccacagagtgccaagtgcccagcaatcattagaggaaggaggctgctgccacctgtgtggctagaggaacagaggggccaatggcattccccaaaccccactctcgcctctgtctggccagagcagaatggcttcttccagcttcccaccctggactcccacccaggagcctcctcctggcagacccttcctgaccccaccggcccggggggtctacagatccatgtttcaggcgtccgcctggagcggaacaggggagtgcttaggacaagggtggtgccagaggatccactctgcccacatttagttgaccagctgaggcactccacgggaatgaatgactctcgacaggtgccggaggtgaggaggggcccggaggcccaggaggggcacagggatggattcgtccgcctgggggctggaggtgtgtttacagagccccaaaataaacaatgcaaccaggtcagaccagcggttctcacagtgtggttcccagaccagcagcatcactgggagcttactggacacgcaaataaatccctgtgtgccaccccagctgcatcagatgctggtggggcccagtgatctgtatttaacacaccctccgggggatgccggtgcccactcacgtttgagaacccctgcgatccacgactgccctcccgtgtaaaaggcccacctctgtgggactccaagtcatcagcaccctagggtccttccgtctttttccttcctcctgggacacctgcctctcccatgtcgtattagagaattccttatgctcccaagtgggcacggggagaggaaggcactcctctttaaggaccgacccagaggttttgccattgcttcactggccagagcttagtcacgcagcctcacccagaggcaagggaggttggaaaatgtagtgtttgtgtgtgtctaacacaaattctattaccatgcagtcaggattctccactcttgctctttcattagatttgctgggcttcaccctggactttctgatttagtgacagaacagagaacccagaggcagacccagatgtgtacaagggcttcatatacaatcaggagatttaataatcatgctaggggccgggtgcagtggctcacgcctgtaatcccaagcactttggggagccgaggcaggcagatcacttgaggtcaggagtttgagaccagcctgggcaacaaagtgagaccctgtctctactaaaaataacaaaaattagccgggcgtggtggtgggcgcctgtaatcccagctcctcgggtggctgaggcatgagaatcacttgaacccaggaggcagaggtttcagtgagctgagatcacatcactgcactccagcctgggtgacagagtgagattctgtcaaaaaaaaaaaaagacaaaaaacaacaggtacggtggcttacacctgtaatcccagcagtttgtgaggccgaggtgggcagatcacctgaggtcaggagttcaggaccagcctggccaccatggtgaaaccctatctctagtaaaaatacaaaaaaattagccaggcatggtggcgggtgcctgtaatcccacctatttgggaggctgaggcaggcggattgcttgaatccgggagttggaggttgcagtgagctgagatcacgccactgcactccagcctgggcaacaagagcaaaactccatctcaaaaaaaaaataattttcatttgtaataggtatcagaatggggaaaaatatttgcagagtctagcactgataagatatcttcttaacaagaaaaagagaccagccataacaggacaatgggcaaaggatatgaacaggcaatttagagaagaaagaactcaaagcccagtaagggtgttcacagctgctcaaactcgttagtcatcagagacatgcacgttcaaaccgtgcggcggtattttacaccatgagtctgataaaaacagatccagcttagtcaagtgttgcacatatgtatctcccaatgattccaatagtcacacccgggtgacttcccaaagaaactctctggacctgaggaagagtcgatgaggacgttcactgtagcattatttgtggggtggagctggaggcaggggcatgtccaccccaggggagtgggtggctaaacagaaggggtgcacccccaaaattcctgtccagacagcaggtaagaaaaacaataataagattcataatacaaggctgggtgtataaatagcaaattatggacataaaacaatggtcctcattttgcaaggttaggagactcatttgcatattagcatggctgccactggggagggagaggggtgagggaaagaatgaatgaactgcagatcttgggagaaatgaaggccttgaaggccacactgaggcttggttctctaagcaaaggggaactcccttttgtgtggcttggggcctggtcacaggtatttaatataaaaataagccaggtgatcctaacatacagccaggattgagaatgggagaatgggctgggcaaggtggctcacacctgtaatcccagcactttgggaggcagaggtgggtggatcacctgagtttaggagttccagaccagcctggccgacatggtgaaaccccgtctctactaagaatacaaaaattagccacgcatggtggcgggcgcttgtaatcccagctactcgggaggctgaggcaggagaactgcttgaacctgggaggtggaggttgcagtgagccaagatcgtgccattgcacaccagcctgggcaacgagcgaaactccatctcaaaaacaaaaaacattgatcgaagtctggctgtgttcaggggctttgctaagctcctagttttgcgccatttaactcctgtagtggttaccaccccccaaggaaaaggttccccccaccaaaaaaaaaaatagattcccccccactcacaaaaaaagataggtccacggaaaatctgtgagtgtggccttatttgggaaaagggtctttgcagatgtgtcctgagttaaggatctggaaatgaggtcaccctggtgtatccgggtgggctcttatctactgaaaagtgtcctttagagaaatgcagaggagatttggggcacacagagaagcagccatgagtcaggaaaagccaggggccttccaggagaagccagaaggggccaggaagcaatctgtcctgaaggcttcagagggaggagagccctgtccacacctgcacttcagacttcggcttccagaactgagagaatacagccaggcatggaggctcacgcctgtaatcccaacactttgggaggccaaggcaggtgaatcacttgaggccaggagttcgaaaccagcctggccaacatggcgaaaacctgtctctactaaaaacacaaaaattagccgggtgtggtggtgggcacctgtaatcccagctactcaggaggcagaggcaggagaattgcttgaacctgggaggcagagattgcagtgagccgagatcgcaccactgcactccagcctgggcaacagagcgagactcgtcctcaaaacaacaacaacaacaacaaaccagaactgagagaatacatggctgctgtttcaagccaccacgctgggaatttgtgatcgcagcccaggaaacatgaccctcgtagccgccttctgcggaactactgtaccttccttggcctgtttcacagatgagagacaggaacaaagatgtcaacctgaggtcacagagccagaaagtgatagaggcaggattcgaatcctggcatcgggcctgggagttcctgcatatcctcaccatgcagcactgagaagtgggtcagggctcccttcactaccccacttgtgggaccacagttaccaacagagaagtgcctgtgtcttcccaggtggctggtcacggaaggagggcaggccccaagccgcagactccaaaagggaggctgtcgtcctagggtgatccatggagacttggggtggagaggtgttggctgggggatgagatggggcagcaagcagggtcctggactgcccttgggggacacgggggcagctcagagccacgcttggggactgctggattatacgaaggtgaactctctgttccctcctctccctgcatcttttttcttttctttttttttgagatggagtctcgctctgtcgcccaggctgaagtgcagtgtcgagaccttggctcactgcaacctctgcctcctgggttcaagcaattctcctgcctcagccacctgagtagctgggattacaggcacaggccaccacgcccggctaatttttgtatttttagtacagacgaggtttcaccatgttggccaggctggtttcgaactcctgacctcaagttatctgcgcgcctcagcctccaaagtggtggaattacaggcatgagccaccgcgcccagcctcctcctacgtctttgtctctgccttcctttgtctctctctttcattctcctgcttagtctttttcattatttgaacaggtggcccaagcccatggtacaaaatgtaaaagatcccaaagggaataaatgggaaaatcagcctccctcccaccttacctccttccccatgcccagcctctcagttctgctccccagaggcagccactgatacaagtttcttgtgcttccttccagatatgtctgcatgtaccaggaaatacttacatgcatatacagacatgtattttccttcatacagatagcataatgggccaggcacggtggctcatgcctataatcccagcactttgggaggctgaggcgggtggatcacctggagtcaggagttcgagaccagcctgaccaacatggtaaaaccccgtctctactaaaagtacaaaaattagccgggcatggtggcttgcgcctgtaatcccagctacttgggaggctgaggccggagaatcacttgaacccgggaggcagaagttgcagtgagccgagattgtgccattgcactccagcctgggcgacagagagtctgtctcaaaaaataaaaataaaaaaaatgttgaatgttggcataacgggcacatccctctgccccttactttttcctacttaacaatgtatcttggtggttgttccctgctggtacataaaaagcaattttgatcctgttagcggctgtgtaatattccattgaacagaggaaccatgaatgataggaacagccactgtcactggacatttagggggcttggagtcgtttggtgttttttattttattttgttttttattttattttgagacaaggtctcactcgctctgtcgcccagcctggagtgtagtggcacaatctcagctcactgcaacctccgcctcctgggctcaagtgattctcccacctcagcctctcaagtagctaggattacaggtatgtgccaccacgcctggctaatttttttattttattttattttattttttatttatttatttttttgagatggagtctcgctctgtcgcccaggctggagtgcagtggcgtgatctcggctcactgcaagctctgcctcccgggttcacgccattctcctgcctcagcctcccaagtagctggggctacaggtgcccgccaccacgcccagctaatttttttgtatttttaggagagactgggtttcaccgtgttagccaggatggtctcgatctcctgacctcgtgatccacccgcctcggcctcccgaagtcctgggattacaggcgtgagccaccgtgcccggccaatttttttcttttttgtagagatggggtttcaccatgttgcccaggctgttctggaactcttgagctcaagcgatcctcccgtcttggcctcccaaagtgttgggattacaggggccctctcttcctgttttctggctctttgtgtatcttgttgctgtctctgcctctccctgtccacactcttccctccttctatccaacctcagtcctgcctctctgtcgccccctgcagggtgaagtgggctcactgcccctccaacctcacaaacctctgtggtttgtatctggggcagacagcacccaccccagcccacctttctactacccctgccccctcccgacctggctgcactttcccaccctccacagccctgatagagagcccaggatctgctcccccagccccaggtgcccaccctccaggacccctgcccttccccctctaccagcaggcttgggccccaggacgtgctgactcctgggggtgacaggttttgcagcaggtgcagtgggagctaggcttgggcaagttggaagcggtgcctcggctgggtcagagcctcttcctcctgccgcccagccgggccttcctgccctccctgcccagcaagcagagcaacgtcaggtcagccctgggctggggacagacaataaacagacctgcccaaggccctgccctggtgaggatgacattcgggcagggtgagagactgtgatccagtgacagccacacgcacagaggtatttacaaagcatgctgaatgcaagaaaggacgaatggggtgtgatagagaatagcagggaaggggaatttatctggcctggggatggcccagctctctttctttgtaccagtagagaacaatcaccaaaccatcttgttaggcagaaaaaagcaagaagggtgtgtgccgtatgacaaggtgacttgttttgttttgttgagacagtctctgtcacccaggctggagtgcagcggcacgatcttggctcactgcagcctcgacttcccaggctcaagtgatcctcccacctcagcctccgaagtaggtggaaccagaggcacttcccaccatgcctgtttttttttgttgttgtttgtttgtttttggtagagacaggggtctcgctatgttgcccaggcttgtctcaaactcctgagctcaagccatcctcctacctcagcctcccaaagtgctataattacaggcactgcaccaggccagtttttttgttttgttttgttttgttgagacggagtcttgctctgtcacccaggctggagtgcagtggcactatctcagctcactgcaacctctgcctcccaggctcaagcgattctcctgcctcagcctcctgagtagctgggattacaggcatgcaccaccatgcctcgctagttgttgtatttttggtagaaacggggtttcgccatgttggccaggctggtcttgaactcctgacctcaagtgatccgcctgcctcagcctcccaaagtgcccggattacaggtgtgagccaccatgcccggccattggccggcttttattatttcatctagttccctggttgtcgacaaggtgatgcttcccagattttcatctcagccccgacccctctctcagactccagccggtacatccagttgcccctggcatcacccctgcggatacctcgtacttcacatatatgcatggagtacttgatttcccaagaaccccctcaaagagctgccccattctgtctgacctcatctccccttcattctcttcaccccacactggcctccgtgctcttccccaacccaccaaaccccgtcgcacctcaaggcctttgcactgactgtttcctctcccagaatgctcctctcctaggcctttgtgcagctaattccttccccttcttcaggtttctgctcaaatatcacctcctccgagaagccctccctgaccaccccaactaggcaaggcttccacctgctcttctctgccctgacagcgcattcttcaccttcaaggcacttagtgctgtttgtcaattaactagttacttgttgaattgtaactagttaattgacatcccttcccccacaaggctgcaagccccgtggggacaggaatggtgtctgttctttcaccacattacaccccagtgcacagggcttggccattgaaggcatctcataaacatctgttgaaagaacaggtggtagaaagcaatgagaggctccggaccttgtttgctttataaaaattatattttttatcagcctgggtaacatggggagacccccatctctacaaaacatttaaaaattaactgggcatggtggtgtgtgcctgtggtcccagctacttgggaggctgaggtgggagaatcacttgagcccaggaggttgaggttacagtgagctatggtggtgccactgcactacagcctggtgacagagagaaaccctgtctcaaaaaaaaaattacacttaggctggatgtagtggctcatacctgtaatcccagcactttgggaggccacagtgggtggatcacctgagatcaggagttggagaccagcctgggcaacatggtgaaacctcgtctctagtaaaaatacaaaaaaaaattatttgggcgtggtgtcacatgcctgtaatcccagttactggggaggctgaggcaggagaatggcttgaacttaagaggcagaggttgcagtgagccgagattgcaccactgcactccagtctgggcaacagagtgagactgtctcaaaaattacacttaaaagtgtaataggctgggcacagtggctcatgcctgtaatcccagcactttgggaggctgaggtgagcagatcacttgaggtcaggagtttgagaacaacctggccaacatggtgaaaccccatctctagtaaaaatacaaaaattagctgggtgtggtggcaggtgcctgtaatcccagctactcgggaggctgaggcaggagaatcgctccaacccgggaggtggaggttgcagtgagccaagatcgtgccactgcactccagtctgggtgacagggcgagactccatctcaggaaaaaaaaaaaaaaagtgtaatacttaaaagaagtaatacgcataagtgataccaaatccaaaagtttcaaaggacatagagtacaaagtcattgtccccaccttgcctgtctcggacgccaccagatctcgcccgcagagtcactttctggaagagatctgacaaatcttcattttatatacatatatatatatatatatatatatgtatgtatattttcttcttctttttcttcttcggcatccattttgaagcacaaggcccactgttccatatcttgctcttctacttaataactgcctcgtagatactttcttattagcaacatagagagaattggcatactgtttttgttttgtttcttattgaggtataatttacatacaataaactacgcccattttaaatctacagtttgctgaattttgacaaatgtatacacccatataatgacaactgcaattaaaatggaactttctcatcagcccacagcatttactcttgtgcctttttgtagttaagccccaccagcctcgtgaaattacagacctgctgtatctgattctagattagttttgctttttccagaactttagataactggaatcacatagtcggtactcttttatgtctggcttctttctttcctttttctttattgttcttttgtttatttatttactttgagtcggagtttcactctgtcgccaaggcgacactgagcagtggtgcaattttggctcactgcaacctctgcctcccgagttcaagcgactctcgtgcctcccgagtggctgggattacaggcgtgcatcaacgcttggctaatttttgtattattagtagagacagggcttcatcatgttggccagactggtcttgaactcctgagctcaggtgattcgcccgtctcggtgtcccaaagcgttgggattacaggcgtgatccgccgcgcccggctttcttttttctttatgctctaaaatctatcactggccaggcctagtggctcacacctataatcccagcactttggtaagtcgaggcaggactatctcttgagcccgggaatgtgagaccagcctgggcaacacagtgagactcccatcactacaaaaaatacaaaatttgtaaaataaataaattttaaaaatgtatcactgtattgcctggcttctttcattcatcacaatgtgtttgagagtcatctgtgttttgtatgtacccatagatcattcctgggctgggcgtggtggctcacacctgtaatctaacactttgggaggccgaggcgggaggattgcttgagctcaggagttcgagaccagcctgggcaacatgaggagactccctgtctctacaaaaaaatacaaaaattagttgggcttggtggtgtgtgtttgtggtcccagctacttgggaggctgaagcaggaggatcgtttgagcccaggagatggaggttgcattaagccgagatcgtgcccctggacttcagcctgggagacagagccagaccctgtctcaaaaaaaaaaaaaaaaaaaaaaaaaaaggtgattcctctccttgctgaagtgtgctccattgtggccattccagttagtttatgcacccactcgttgctgggcactcgggttcccctcagtttgcagctgttatgaaaaagtaccgtgaccaggtctctgtgtggacaatgttttcatttcccttggctaactacttcagagcagggtcactgtgtcgtaggttgtgcatattttttgttttataagaaattgtcggccaggtgcaggagctcatgcctgtaatcccaacactttgggaggccggggcgggtggatcacaagatcaggagttcaagaccagcctggccaatatggtgaaacctcatctctactaaaaatacaaaaaaattagctgggtgtggtggtgcatgcctgtaatctcagctactcaggaggctgaggcaggagaatcgcttgaacctgggagtcgggaagttacagtgagccaagatcacgccactgcactctagcctgggcgacagagcaagactctgtctaaaaaaaagaaaaaaaagaaaagaaattgtgcaatccttttccaacgtggtcataccactgctcgtgctttctgtacttcgtgatatatgagacgtggctttggggaagagggactgtgttggtcacccaggctttgacgtatttgggaaatagcctgtcggggctgaacccccatattagggactttaccatccccctgctggagagagggggacgtttgggacttattgttagaatgcacttggaggccgggtgcagtgtggttcacccctgtcatcccagcactttgggaggccgaggctgcagtgagctgtgatcagcatcactgcactccagcctgggcaacagggaaagatcctaactcaaataataataataataataataataataataataataatgcacttggctttgcagggcccagctgtggccctggatcccttggattgaagtaaaagggtttctcatagattctggggcccatcacaattactgaagccggctccttggaaataaatgcacatttctcagaggctccctgggtgaatctgacagaacctgccctaaagtttgggaaccgctgagtttgggaaccacaaaagccctgagatgcaagagaacaggtcctggaggcagagaccagaaacccaggaccttggatgctggccaaagagatgggatttttctcctgagggcactggggagtcatggagggcttaactgggggagtgacacagttcaggctttagtccaacccctgtggctgtcatgtgtatgggtgtgtgtggaacagatgtgagcgaggcacccagaaaggagatcatgtgaaaaccacagccagggtaggggtaggcaggaggggatgtcaatctctacagactctagttttctttattttcctttattatttttttttcaattctttttattttttattttttgagacagaatctctctctgttgcccaggctggagtgcagtggtgccatcttgactcactgcaacctccacctccccagttcaagtgattatcctcagtagctgggattacaggcatgtaccaccatgcctggttaatttttggtatttttagtagagattgtatttttagtttcaccatgttggccagactggtctcaaactcctgacctcaagtgatctgcccacctcagcctcccagagttctgggattacaggtgtgagccaccgagcccggcctattattattgttttttgagacagggtctcgctccatcacccaggctgcagtgcagtggcggcgccatctcagatcactgcaacctccacctcccaggctcaaacaatcctcctgcctcatcctcccaagtagctgggactacaggcatgtgccaccacgcctggctaacgaggtctcaccacgttgcccaggctggtatccaactcctaggctcaagtgatctgcccgcctcagcttcccaaagtgctgagattacaggcacaagccaccgcatccagccactctacagactcctggctgcccttctgtcctagtctcctccggctcccagccactccctgccctggattctgacctgggcacagctctgactacactcaccagacacccctccttctccttctcctcctcccccatggcgatgacaggtctcaggcagggagggtgggcagccaggacaagggcgtgggtttgtgtgcgtgtggtggtggtgggagtgtctggtcgtgcgtgtgttgtgagctctgccagtgtttgcctgggaatctgctggggacttccaggtgcagtatttgttgatctgctccctcccctggtttttccccacccgctgggcactggttaattcccaactttccagggcagtcacttcacctctcttgcctcagttccctgatctgtcaatagagatacaattaccagttcccaactctgcagggttgtgaggttcaaagagtccaagactcaataaatgtaaccatcatctcctgcttgcttctgtatgagcccatgtttcttcccaggggcgatttgttttttgttttgttttgtttttgagatggagtcttgctctgttgcccagcctggagtgcagtggcacgatctcagttcactgcaacctctgcctcctggattcaagcgattctccggcctcagcctcccgagtagctgggactacaggcacgcaccaccatgcccagctaattttttttttttttgtatttttttttttttttagtagagatgggggtttcaccatgttagccaggctggtcttgaactcctgacctcaagtgatccgcctgccttggcctcccaaagtgctaagattacaggtgtgagccactgcgcctggcctgtttttgttttttgtttctttgagacaggatctcattctgtcacccaggctaaaatgcagtgatgcgatctcaggtcactgcaactttgacctcctgggctcaagcgatcctcccacctcagcctcttgagtagctgggaccacaggtgtgttccaccaaactgagataatttattaatttttttgtagagatggggtcttgccatgttgcccaggctggtctcaaactcgtgggttcaagtgatcttcctgcctcagcctcccaaagtgttagattaccggtgtgagccaccacactcagcccttgggggcaatttgaatctgtgtccctgtgtatgttctctaagattctgtatgcgagtgtgtctaactcgttgtgtaccagctgtgcaaccttgggtgagttactagacctctctgtgcctagtttcttcatctgctaaatgcacatgacttcctagtcatgctacttcctagggtggatgtggagactgaattaattgcctaattaattacctaagtccattgcaactaatggacttagtgcaatgcctggcatgagggcagcctcaattacatgatcattatcactggggcgtgacttctgtcccccacccgctgagtgtctgtgagtgtctgagcgttggggcaggaagtgcctgtgaaagcatgtggagttatctgggactatatgggacccagcctgggaaggcagcttctgtttccatggcacccctcacagggttgttgtattggaaagacccgtcccagagggcatccgccagcacacagctgcacacacatgtttgctgttacttttcctttacctataaaatgccagtcatagtagcacccaccttgtctttgtaggagaatgaaatgaacttagaggcgctcagtagaaagcactcacgcctgtaatcccagcactttgggaggccaaggcaggtggatcacttgaggtcaggagtttgagaccagtctgatcaagagggtgaaacctcgtctcttctaaaactacaaaattagctgggtgtggtggcacatgcctgtaatcccagctactcgggaggctgaggcaggagaatcacttcaacccgggaggcggaggttgcagtgagctgagatcgtgcttctgcacttcagcctgggtgacagagtgagactccatcagagagagagagagagagagaagcaagcgctcagtgctgagcttacctgggccaggtagagggatgtggccacgggcaggaagtggctgtgggaatctggcgctacaggttcctctgccaccccacttcctccacacctgacctcctgtccccacctgtgccccgtcccttgctcccacctcctcgtgacctctgatgggggaggcttctgcagccccccaccccagtcccaggcaggggtgcaggcccccagaacacccagttgggatcactgcttccctctcactgccatctttgtgcctccctggggtcccccatctctgaggctcctcatctctggttttgggtgtctctctgctctcctcaccttggttttctggacagtatgtgtcagggccccaagggggtgtcccaggtgaggacagagaaggaagtggcagaggcaggaccttccctttgcacctcagctcatccatccactccccctctgcagagtggggagggggaggaggggggtcttcgttaattagcctcttaatcctgccatgctggatcttaatgaggtgcacgggtcccattagacagcccggagccctggcattagcacattagtcacacgctctgtcaggctcacgctgggtcctcagctggccctgggaaaattggggcaggaagtctggggacctaaggagggggctggtgcctggacttctgggtctgaagaaggaggggctggtgcctggactcctggatctgagggaggacggactgggggcctggattcctgggtctgcgggaagaggggctggtgcctggactcctgggtctgagggaggaggggctggggtcttgaattcctgggtctgagggaggaggggctaggggcctggactcctgggtctgagggaggaggggctggggtcttgaattcctgggtctgagggaggaggggctaggggcctggactcctgggtctgagggaggagggtccgagggacaagatcctcccccgacacgcccctctcttaaatgtcagccagggtgccctgccccttcccgctcccagttaaccccagccctgtgaaaccgggacagtcgcgcagcctcgagggatggaggaggtgcgtgagggacacgcgctcggtggcgggatggaagccgatgggcccgcgagcctccaggagctgcctccctcgccacggtcgccttcaccgccgccgtcgccgccaccactgccctcgccgccgtcgctgccatcgcccgcagccccggaggcccccgagctccccgagccggcgcagccgtccgaggctcacgcccggcagctgctgctggaggagtgggggccgctgagcgggggcctggagctgccccagcgcctcacctggaagctgctcctgttgcggcggccgctctaccgcaacctgctgcgctcgcccaaccccgaaggtgcgcaagggcccagagcagccaggaggcaccaccctgaccgtctgtctcttcctctttccctgtttccttatctctctacctctttgtctctctctgtctatgcatttctctgcatccctctgtctctttttctgtcattgtgcctctccattttaccacctgtctctctgtcatgtctcttacctacctctctcacacctctccctcacacctctccatctctctttctctctcctcctctctctctccccctctgcctatgtttctgtctcttgagacggagtcttgctgtcgcccaggctggaatgcagtggtgcaatctcagctcactgcaacctccgcctcccaggctcaggcaattctcctgcctcagtctcccgagtagctgggattacaggcatgcaccaccatgcctggctaatttttgtatttttagtagacacagggtttcgtcatgttggccaggctgggctggtttcaaactcttggcctgtctctttctctgggttcttctctctgtccctctgtctctgtctgtctcaccacaccccacttacccctggcattgccctctccccagcccagagccctgactcactcatccctgccgggcttccctgacctggcacagattcctgcccttccagtgtatagccctgcgggtagggaggggtgaggcggtggaagatggaggggctgcccagaggctccactcacctgtccatttcaggcatcaacatttatgagccagcaccccctactggtcccacccagcgacccctggaaactctgggtaagtgcttggagggccaggttgctgagggtggggagggtcctccagcgttggggtgtcctaaccctttgctccccaacctgcaggcaatttccgtggctggtacattagaactgaaaagctccagcagaaccaaaggtgagtcgccagggccagtgtggcttacactccattccctgctccacccttcctcactgtgagacctggagaaactgacttggcctctctggacctccatttcctgctctgtaaacagggttagcataagagagaatgcttgtaaaacacacagcatagggcccggccaggtctggctagcaccagtcaatagcagctattattggtttttggtttttgtttttaagatgaagtctcactctgttgcccagactggagtgcagtgacgcaatctcagctcactgcaacctctgcctcccaggttcatgcaattctcctgcctcagcctcctgagtagctaggattataggtgtgcgccatcatgcccagctcattttgtatttttagtagagacggagtttcaccatgttggccaggctggtctcgaactcctcacctcaagtgatctgcctgcctcagcctcccaaagtgctcagattacaggcatgagccaccgcgcctggctattcttgttattgttgtaattattctaaggctctttccctgggaggggaagagtcaccccaggcccctgtcctccatgaaacagagccttgctcctgcacagtagatgagctggtgtgacttggaggctcagggtcacacaggccagggttgggatcctggctctgccacatgtttgctgcttgaccttggacacgtctccatcctcagcctcaggttccttgtctgtagcatggggttcaggatgcattgccctcagaggggcccgtgggaactgagagtggaaggtgctgagggagcaccccacgtgtggggacccaagctatccctaagaaagcactaagacagggcttcctgctccctggatcctggcagatcgcagaccccgcctctcccggcccttctttcacagctggacagtgaagcagcagtgtgtggaccttctggccgagggcctgtgggaggagctgctggatgacgaacaaccagccattacggtcatggactggtgcgtgcccctcccctgccagcctgaccccgtgatcgcgcagggctgcccagagcatgagccttactctgagctccccttgctttcagcccttcaccaagaccctcctggtgctacagggtcctgccctgcccacctccctggccccttctgtttgagcctttcagattttgaaatgtgccagggggttactgaggctgatctttatttctttttcttttcttttttttttcttttttctttcttttttttttttttttttttttttgagacagctgactctgtcgcccatgctggactgcagtggtgccatctcagctcactgctacctctgcctcgcaggttcaagcgattctcctgcctcagcttcccaagtaactgggactacaggcgcgcgccaccatacctggctaatttctgtatttttagtagcgatggggtttcaccatgttgcccaggctggtctcgaactcctgacatcaagtgatctgcctgccttggcctcccaaagtgctgggattacaggtgtgagccactgtgcccagcctattccttatttcttaaaagcctgtcaccctctattctcaagaccaattccttcttattccttaggagtcacttccacatggctgcaccaggaagccctccctgatcacccctcagctgggtcacgtgcattttctccagtgccctgtgcctccaattccagccccaacccctctgcctgggtccccaattccgaccccaacccctctgcctgtgtccccagttctgtccccaactcctctgcctgggtccccccatcctggccctgacccctctgcccgtgctccccatcccaaacctggccgttcctggctgtcatgtttggtggcatgcctgcctccctcactggactgtgaatcccatgtggcagggtgtggggctgtcttggtcactgctatgttgccagcaccacccagctcagggctgtgtacagcatgggtagcagcatgtgtgttgaatggggaatggggccaggggctggggctgggtagctgagactgcagtgacagctgaaggccttgactccgcctgcaggttcgaggacagccggctggatgcgtgcgtctatgagctgcatgtctggctgctggcggccgaccgccgcacggtcattgctcagcaccacgtggccccccgaacttctgggagaggaccccctggccgctgggtccaggtgagactctccgcgccggggccctcaaccccagacgtgtgttcttgtcccaagacctcacagagggaggagaacaggtccgcgggtcctcaaaaagggctcctccctaaccccaggtgctgtcaccacaggtgtcccacgtattccgccattatggtcccggtgtgcgctttatccacttcctgcacaaggccaagaaccgcatggagcctggtgggctgcggcggacacgggtgaccgactcctccgtgtctgtgcagctccgggagtgactggctggctcctctgtcctgaccccacagcacctccctgacctttaggagccccaactcttagtcacctcctaggcctcttatttctccctggcccttggcttctcacttgatggacagcttcacacacccttaagcggtggactccagcattttcccagcactgtctgagccccatgagggcggagccactccttgtaaattcagtgcccgacagatgctctggcacagatgctttgtagatctctgttgagagaatgcatagacacctgtgcccaaggatgctgagggctggtctctgcttctttgaacttcactgaaactgaatgctcactgctgtgttgccagcaccacccagcccagggctgtgaacggagtgggtggcagcaaatgtgtgttgaaaggggaatgaagccattcacttcactcagttcctgtcccatttaaccgccccgatccttgatcttccattaccttcacatcccggggtccttctgaactgaccttgacctctgatctcttcacacatctccccttagcatctccacttacctacttttttttttttttttgagatggcatctcactctgtcacccaggctggagtgtagtgacacgatctcgactcactgcaatttccacctctcaggttcaagtggttctcctgcctcagcctctcaagtagctgggattacaggtgcacagcacctcccccgactaatttttatatttttagtagagacgggatttcgccatgttggccaggctggtctcaaactcctgacctcaagtgatctgcccaccttggcttcccaaagtgctgggattgcagacgtgagtcactgcgcccagccattccatgtctcttaagtctcagaatctcccctagctccctccaggtgtctgcagtggttgtcccctcaaagctgtcccacaccctcctccgaggaccctttgtgtatctcctccagctaccgcagagcccacaaacccaggcatctatcaaagtccctcattcatgagggtggtgaggacacagactgcgaccagaacagaaatatgaaaatgtgaatgacagcgtcccccgtgtgtggaatgtggggattaaaagcatttatcaacctctaagtcctgatctgatcacttgcagatcctagccctagtgcagggctgggtactagaaggccccctgctgtcccctgcaggaaccatggagggagtccggaggcccctggaggccagaaacggctcaaggaagagtgtttgtttgtttgttttgagacagagtgctccctctgttgcccaggctggagtgcagtggcacgatctcggctcactgcaacctccacctcccaggttcaagcgatttctggctaatgtttgtggggtttttttgtttgtttgtttgtttgttttgttttgagatgaagtctcgctctgtcacatgatctcggctcactgccagctccgcctccaggttcaagccattctcccgcctcagcctcccgagtagctgggactacaggcgcccaccaccacgcctggctaatttttttgtatttttagtagatacggggtttcactgtgttacccaggatggtctcaatctcctgacctcgtgatccgcctgcctcggcctcccaaagtgctgggattacaggcgtgagccaccgcaccccgccctaatgtttgtatttttagtagagacggggtttcaccatgtttgccaggctggccttgaactcctgacctcaggtgatccgcccacctcagcctcccaaagtgctaggattacaggcctgagccaccacaccagggctaaggaagggctattactgaaaaggatggggcatgtttcatatttaacaatcagcccaaggttcccctgcagttcactcacatgtccttctgtgggcgtgtgtcttcgtgcacacctaaaaccatgtccgagtcgatggcgtgtccttatccatggcattgtcctgggtatgggctgacccaggcccaaccaccctgctgtctcctccatcccacccggtccttgcatcccagggacaagcagatgacagacggggacaactgcacaaaggctgtattgcaggggaggtgggagggggcaggcagaacgctcctcctcctgggtcttggggccccggagcagagcccagggatgggctgagtgaggggcttggcactctgtggaagctgcagatgagagaccagcaatgcatcagctgcacctgaaatgtaatcaagaattccttccaggggctctcagagacccagagtctggtgagttctagaagcctgagactgggtgggggctggggagtctgggtctgaggctccaagttcaggaaccagggatcctagcctgggagtttggagctgggggctccttggagctcttgggggacaggagtggctggggagggtttgggagggtgtcaccgctggatctaggtcccaggtctgtgagtgcaaggtggcctcagggacctccagggttgggtcttgggggtgggctgtgggactgattttagggctgaggctggtctggagggtctaggggagtggagagcatgaaggctacactgggtgttcctataatcgagtctggagtcttgaggtctgggttagttttggagtctgggagctttgagatgtgatgatctggggagtgggggctggctttggttctggggactccagggtgagggggtctaggagctctcagtccccagaattagccagccctctctgggaagtacagctgtgggcgggtgggtaggcggaagattccagaaggtggagggttggctctgaatctcagagctggggcggaaatctccgtcccaggggcctgggctgcaggtggagtggggaccgggtgctgggggtgaggagaaggaggacctggtttgggtgaggactctgagatgggggcctccaggactggttctagggaggcctggtgctccctgttacagtcgggagctcaggggtgtggagcagcctcggggcttgggtggtgggtgtgggggcttatgcggagctggggcctgggcctggggtgggctcggagctttgggcggccgggcacctgcagtagagcgcggagatagcgttggaccagtctcctaagatgccccggcggtactcctccaggcgcgggtaggtgccggcagagaacttgtgcgtcttgcccgccttgccttgccgggaccacacggtgagctcgcagcgcggggccaccacaagtgaggaggcggtgttggcccagttggagggcaggtagggcaggtctgcgcccgactccagcgacagctcggcgcccccgcagcagttctcatagtaggggtcgctcttgtcatagagcttggcgcaagtgcgcgtcccgtccgagtgcttgaggtcggcggaggcggggcaggcgccctgggcgcaaggcacggaggcaagggccagggccagcagcagcgggcgcagcggggacatggtggcagtgccctgccgcagccccgcgcgcttttatgcgcccgacccgtgggaagggacaagctgcgagataaggactcatcgagggaaggggagggcgcccctccctcaggagccgggagacctgcctaacctaggtcggaagcccacaaccctgagtacaaggtggacgctgtgtatacaacttagcaccttaagatgttaggtgaccaacaacattataaagagagacaatagacagaacttgaggaggagtcatttgcaacacagagggtggcataggttaatagacagaaatgggaagagctcttaaaaattgacaaggggcttgctggttgctcacgcctgtaatcccagcactttgggaggcctagacgggtggatcgcttgggcccaggagtttgagaccagtctgggcaacatagcaagatcccatccctactgaaaaataaaattagctcagcgtggtggcatggcctgtagtcccatctactcacaaagcagaggcggaaggatcgcttgagcccgggagttcgaggctgcagtgagccgagatcgtttcactgcactccagcctgggcaacaaagacaggaaaaaaaagataaggaatggaacaacccttattctaaataaggaaagactgggagggggaggcaggagtgggaggctggggcctcctggctgggcaggctccctccctgggaggcaggaccttgggaaaggagaagctggagataaggatagaggccctcgtggtggggcgggggggggcaggtagagaaggagatggggaggagcccaacgccccaccccccacccccaccaggctcagactgggcaatcttcccaaccaaggctggcaatccagaatctgtgaagtacaagatagcagtatttgcataacacgttaaaaaccttttgcaagacagtgtacaaaggcttgaggagatatttgcaacatttcaaaagcatagcattgcaagctataatatataaagagtgcacacaggttgggcgcggtgactcacgcctgtaatcacaatactttgggagactgaggcaggtggatcatttgaggccaggagttcgagaccagcctggccaacatgatgaaaccccgtctctacttaaagtacaaaaattagccaggcgtggtggcacatgcctgtagtcccagctactcgggaggctgagggatgagaatcacttgaacccagaaggtggaagttgcagtgagccgagatcgcgtcaaaaaaaaagagtgcatacaaattgacaagaaatgcactcctccctcccacatgctaaggacaggcctaggagagggagagggagggaacagcctgcaactcccaccccaggagccaggagactttcttaactaaggttggaaatcttcaatctataaaacttcaatcttgttttatagattttgagctgtataaaactgtaaaaactgtcatatagcaaaaacaaaacaaaacccacaaacccatccagggaaaaatagactcaattcctatcatataaaatgagctcttaccaatcagccaatagaaatgaaacaagggccgggagcagtggctcacgcctgtagtcccagcactttggaaggcccaggtgagtggatcacttgaggtcaggagttcgagacccgcctggccaacatagtgaaaccctgtctctactaaaaatacaaaagttagctgggcacggtgacacacagagcctcgggaagctgaggcaggagaattgcttgaaccgaggaggcagaggttgcagtgagccgagatcacaccattgcactccagtctgggtgacagagtgattctgtcaaaaaaaaaaaaaaaaaaaaagagagaaagagaaaagaaacaagcaaaggaaaaattagagcagtataggaaggagagggagattggaaccctcgggctgaacagggacccggacctctgggagcctggccaaagcccttccaaggttctttggagttcccagcctcttcccaaaacagggtcaagtgtgtggatgcgctgattagagagacaagggtccactggctctgtcagtacaggtgtgggccttggtttcctcatctgtgaaatgggtaatgtttcctcctacgccatacgaatgttgaaaaggttgcaggagatggtagaagggatgtggtttaggaggacagtccatggagtcaaactgcctgggtccaaatcccagctcctctacaagctgtgcacatgaaggcctcagggacacgctgatggtacctacctcagagtgctggtataaggaataaattaattgggctgggcgcagaggctcaccgcctgtaatcccagcactttgggaggccaaggcaggaggatcacttgaggtcaggagttcaagatcagcctggccaacatggcaaagccccatctctactaaaaatacaaaacttatccggtcgtggtggcaggtgcctgtaatcccagctacttgggaggctgaagcagaagaattgcttaaacctgggaggccgaggctgcaatgaactgagatcgtgccattgcattccagcctgggtgatagagtgagaccctgccaaaaaaaaaaaaaaaaggaataaatgaattaatccacataacagcacttagagaagggatcggcctttgctaagtgccatatgagcatttgccatcatcatcaccaccatcttttttttttttttttaagagatagtctcactccgtctcccaggtctgcagcctcaacctcctgggcttaagcaatcctcccacctcagcttcccaagtagagaacatgccaccacaggcccgcaccaccacactctgctaattttttggttttttttgtagagatggggtttcaccatgttgcccaggctggtctcgaactcttgggctcaatcggtcctcctgcctcccacagtgctgggatcacaggtatgagccactgcacccggtgcatcattattattattaaaacctttagcacagtgcctggcacatagtaaggactcaataaacctcaaccatcacaacaacataacaccaacaatttgctgttatccacagtcactcagctaaacctatgccctgctggtcctccttagatgctgtggcttccacctcgggtggggtagggctgttgtagagagccaaagactggaaacacttggaagtgggttcggatgtttactctgccacctgcttgctgagcaaccttgggaaaatgaacttacctctctgagcttcagtttcctcctaccttcaatgggataatagaaaatgaggtctcatgagccaggcatgatggcacatgcccatagtcccagttacttaggaggccaaggcaggaggatcacttgagtccaggaggtcgaggctgcattgagctgtgattgcatcactgtgctccagcctgggcaatagacggaaaccctgtctcaaaaaaaaaaaaaaaaaaaaaaaagacgtctctataaagtaatttacaactgatataatacattatgaacaatccatataattgttatttataaatataatataggctgggcacggtggttcatgcctgtaatcctggcactctgggaggccgaggcgggaggatcacttgaggtcaggagttccgagaccagcctggccaacatggtgaaaccctgtctctactaaaaaaatacaaaaattagctgggcgcggtggcacatgcctgtaatcccagctactcaggaggctgaggaaggagaatcgcttgatcctgggaggcggaggttgtagtgagccaagatcgtgccattgcactccagcctgggtgacagagtgagactctgtctccagaaaaaaaaaaagaaagaaaaaaagaaatatatatacatacatatatatgtatatgtatgtaatatgaatacttaatatacaatattgcattaacacaatagtataaatgcaaatacataaagcatgaagtacagtgcccaacacatgataggtactcaatacatgggagctactatgactgttctcctaacagctctgagaccctggccattggcctggccctgcccagggatccttctttctcatttccttttgtgatcccttgaaatctaatctccagctgctgacttcccagagagcctccttggtcccaggggcacagaacacccaccctctggctctgcaccgccccagacacagggatggaggacagcagagtcacttagagtcctgcccaccccggagggccatgaacttcagacacagagagcgacatggctagggagaccctgacagggagacagacacaggcacaggaaggaacacggaaaccactgaggcacagtacacagcccgtgtctgacagagcccacagagacccagggcctgggcacagcattttcaatcccgcctcacacacgggcagggagtagggacacgcatcacacagccagccactgatggtcctggattctcactggtgaatcctaaggtagacacatgcacagatctggggcaacacgtacccctgtcccccaacggaaccacacacagccattgtcacaaacaagcctccagtcttcctccactcccgccctacactctacaaatctcacaatctcacacctgtgaaatcttttttttttttttgagacagagttccgctctcgttgcccaggctgctgcagtgcaatggtgcgatctcagctcactgcaacctctgcctcccgggttcaagcgattctcctgcctcagcctttcaagtagctgggattacaggtgcccgccaccatgcccagctaattttttgtatttttaatagagacagggttttgccatgttggccaggctggtctcaaactcctgacctcaggtgatccacccacctctgcctcccaaagtgctgggattacaggcgtgagccaccgcgcccggcctctttttttttttttttttttttttacattgtcggggtctcgatctgttggctagactggtctcaaaatcctggcctcaagcaatcctcccacctgagcctcccaaagtgctgggattataggcatgagccaccacacatcatgtgaaatctcacacacacacatctgacttgttcacataagcacacgtcacacacacacacacacacacacacacacacacaggcgcacagcgtcctcatccagaaacaatttcctcagtatttattaacacaaactagacaaatggtagaaaagcgaacatcttattacacaattttttctaataggagaatgtcctgcccttgaggaaccatgagcccttgagaatgtcagatggtaaataaatcaataattcgaacacaacgtgaaaagagttagaacaggggcatacaaaggaatgcaatgggaagaatgacaggttggtttgtttgtttcatatccactgatatattttggtttgtataataaggaatcctcttttcaggttttacaaccttgatttgacatttttcagcacagcataaaaagagagattgcttatacatgtgaaattgccactagaagaaaaacggaagtatttgtctccatcagggtggtacttgaacataaacaacattataggttgtacataatttaaatgaaaatgctgtgtgttgcataaatacaggaaaatactcagatcggtacttaagttcatactgggtcatcagaatgcattacaattttgtaaagatatgacactgaatgacattttctttctttttttgagacagggtcttgctctgttgtccaggctggagtacagtggtgcgatcacagctcactgcagcctcaaactcctggcctcaagcaatcttcctgcctcagcctcctgagtagctgggaccacaggtacacaccaccaagcccagctattttttttttttttttttgagtggagtctcgctctgttgcccaggctggagtgcagtggcacgatctcagctcactgcaagctccacctcccaggttcacgccattctcctgcctcagcctcccaagtagctgagactacaggcgcccgccaccacacccggctaattttttgtatttttagcagagatggggtttcaccgtgttagccaggatggtctcgatctcctgacctcatgatctgcctgcctcggcctcccaaagtgctggaattacaggcgtgagccaccgtgcccggccggcccagctaattaaaaaaaaattttttttttttttagagataaggtcttgctatgttgcccaggctggtctctagctcctgggcccaagcgatcctcctgctttggcctcccaatgtgttggggttacaggtatgaaccactgcacccagccagattatttccatataattctttttttttttttttttgagatggagtcttgcacttgtcacccaggctggagtgcagtggcgcgatctcggctcactgcaagctccgcctcctgggttcacgccattctcctgcctcagcctcccgagtagctgggactacaggtgcctgctaccacgcccagctaattattttgtatttttagtagagatggggttttaccctgttagccaggatggtctggatctcctgaccttgtgatctgcccgcttcggcctcccaaagtgctgggattacaggcgtgagtcaccacacctggctatttccatataattcttaagggatagtataatcccaaagcagccgtaactgtgtggtttggagacagtggttctcaaagggtactccctggaccaacagcatcagcatcctgtcagaacttgctagaagttaaaattctcacccccaccccagccctactctgggatggggccttgcaatctgggttttcacaagccctcctggttactccagtgcacactcaagtttaagaactgatggctagggcttcagtctgaggcttcctatgtcacgaatggtttattatacctagaattttcttctctttttctttttctttttttttttttttgagacggagttttgctttgttgcccaggctggagtgcagtgtcatgatcttggctcactgcaacctctgcctcctaggttcaagtgattctcctgccacagcctctcaaatggctgggattacagacacacgccaccatgcccggctaatttttgcatttttagtagagacggggtttcaccacgttggccaggctgctctcgaactcctgacctcaagcgatctgcctgcctcggcctcccaaagtgctgagattacaggcatgagccaccacgcccagcctacgtctagaattttctgtattgatacttcaatttgtttagatcctttaaaagtatatttcatgtaattctcctgattacagaaaaatattgtcattagcaattagaaaagggaacatctccagtgcctggagctccaaatgcccagactgaacttgaatctcctgcaacacagacaaaagattggtcatcagctaacctcaggacacagctcacctccattttctcagatacacctatggcaggtgaggtgccttgtcttaaaggttcccggggtcccacagtccctttctggtctaggccagagctactcaacttttaaggtgctgccaacctcctagagggagagggagagggagacgggaaaggtcttaagctacagattctgcttcaacaggtttgggcttgggtttaggtcctgaatttccttttttttttttttttttttgacagagtcttgctctgtcgcccaggctggggcacactgtagacaggatttcaccatgttggccaggctgatctcgaactcttgacctcaagcgatccacccgcctcggcctcccaaagcgctgggattacaggcgtgagtcactgcgcccggctgggtttaggtctgaatttcctgcaagttcccagagcatgccaggctgctgagggccattgcttgagtggcgaggctctctgcaaactgacagtctaagctgagacagataatgcaagaatacagcccaaatttggaacctgccaccaggaggaggtggcaggaatacagagggaagccaggcccagagaactcagggaagcgatggagatggaaactcagattaaattctgaaggaagccggtgaaggaagctggatctgaaactcttcagggctgcaatagcgttggtccaggagcccctgcgggtggggagtgaaaaccctaagccaagcccagattggggacagggtttcgctggtagcagggcccgggaagggggaacccagaagcgctcaggaggtggcgccatagcacagagattgagtgggtccaggactgtgggttcaaatcctgcctctgccttttatgggctgtgtgagtttgagcaacttactcagcctctctaagcttcagtttccctcatgcatgaagtggacacaatacacacacaaaaactgcttacgtgttcttagagttttgagatttgtagggaggtttcctgtttcttattgcttaatattggtcatcgatacattctgtctcgctctctcttattttttaaaatgttattaatttttatcaggcactctctgagccagagtagtctcagagactccctcattttttcttttcttttttttttttttttttttttttttttgagatagagtctcgctctgtcacccagattagagtgcaatggtgcaatcttggcttactgcgacctccgcctcccaggttcaagcaattctcctgcctcagcctcctgagtagctgggactataggtgcactccacgatgcccggcttattttttgtatttttagtagagacgaggtttcaccatgttggccaggctggtctcaaactcctgaccacaggtgatccaccggcctcagcctcacaaagtgctgggattacaggtgtgagccaccacgcctgacctcattttttctctatcagttttgatttataattgcaaaacttttttttttttagatggagttttgctcttgttgctcaggctggagtgcagtggtgcaatctcggctcactgcaacctctgcctcctgggtttaagtgattctcgtgcctcagccccctgagtagctggtattacaggcacccgccaccacacctggctaacttttgtatttttagtagaaacagggtttcaccatgttggccaggggctgatctcgagctcctgacctcaagtgatccacccgcctcagcctcccaaagtactgagattacaggcatgagccaccgcatctggccttataattgcaacatctttattagactcttcgccaatgataactaacagttggctttgtgggttcgggttctcctattgtacatttgtttctttaatttgatcttatttcattaatgataaatagcattagttaccattgtggatttggttattataccttttttttgtttgtttgttttgagttaaggtgttgctctgtcacccaggctggagtgcagtggtatgatcacagctaattgcagcctcaacctcctgggttcaagcaatcctcctgcctcagcctccagagtatctgagaatgtgccaccatacccagctatttttttttttttttagtacagctgggtctcactctgttgcccaggctgttcttgaactcttgggcccaagcaatcctcctgtctcagccttcccagtagctgggactatgggtgcatgccaccatgcccagctaatattttttctttttgtagagatgggatcactcactgtgttgccaagctgctttcaatctcctgggctcaagtgatcctcctgcctcggcctgctaaagcactgggatttcaggggtgaagcgctgctcccagcctattatatctttcatgcttgctttctttattcttttttcctttgagttttttgtttgtttgtttgtttgtttgtttttgaaacggggtctcgctctgtcatccaagctggagtgcagtggtgcgatctcagctcactgcaacctccgcctcccaagttcaagggattctcctgcctcagcctcccaagtagctgggactacaggcatgtgccaccatgcccagctaattttttgtagttttagtagagatggggtttcaccatgttgcccaggctggtcttgaactcctgacttcaagtgatccacccaccttggcctcccaaagtgctgggattacaggcatgagccaccatgcctggcccttttctttgagttttgcgtgctgttcttttcctcacatttaagatagatggttagctggcttattttcagcctcgttccttttcccacatttgtatttaaggctttacactttttttgtgggattgttgtgtgtcttacataagcaaaaagtatagtgggttgaggttatttcaggcacatggaaagtgctcagtgtgtttactgacatggatgatggttttgattattatttaatttatttatttattttgagacagagtcacactctgttgcccaggctggagtgcggtggcgcgatctcacctcactgcaacctccacctcccgggttcaagcaattctcctgcctcagcctcctgagtagctgaaattataggtgtgcactaccacacctggctaatttttgtattttttaaaatagagatggggtttccctatattggccaaggtggtcccgagctcctgatgttaggtgatccacctgcctcaacttcccaaagtgtgattattattattcttattaatcaggagctttagagtcagagaaagattcaagcaagaagtttggattaattatgaatcagtttcctattgctgccgtaacaaatgattgcaaacagtgctttacaacaacacagattcattatctcacagtcctggaggttggaagtccaaaatgagtctcctttggctaaaatcaaggtgtcatcgggctgccttccttctggaggctccaggggagaatcctgtttcttgcattttccagattctagaggccacttgcattccttagcttgtggccccttccttgttgaagtcagcaacagagaatctttaaatccctctatgactctgtccttttctgctgcctgctcttccactttaagggatccttacaattactctggtcctacccacataatccaggataatttcctttgttgttgttgttttttgttttaaagacacggagtcttactctgttgcccaggctggagggcagtggtgtgatcaccactcactgcagtcttgattacccaggctcaagcaatcctcctgcctcagctgcctgagtagccgggactacaggtatgcaccaccacacctggctaatttttgcatatttttgtagaaacagaatcttgctatgttgcccaggctggtctcaaactcctgggctcaagtgatcctccagcctcagcctcccaaagtgctgggactacaggcatgaaccaccgcacccagcctagagtccatgtttttagccactcagctccaggatacactgagcctggttgcatagtcaatttcttttcttttctttttttttgagatggagtgttgctctgtcgcccaggctggagtgcagtggcatgatctcagctcactgcaacctcagccttccaggttcaagaaattctcctgcctcagccagcctcccaagtagctgggattacaggcacgtgccaccatgcccaatttccttattttaaaatcaatgggacatgcgtggtggcttatgcctgtaatcccagcactttgggaagccgaggcgggcagatcacttgaggtcaggagtttgagaccagcctggccaatatggtgaaaccccatctctactaagaatacaaaaaattagctggacgtggtggcatgcacctgtagtcccagctactcaggaggctgaggcatgagaatcgcttgagcccgggagacagaggctgtagtgagccaaggtcacaccgctgcactccaacctgggtgacagagtgagactgtctcaaaaaaataaaataaaataatgattagtgactttaattccatctgcaaccttaactcttccttgctgtgtaacataatatattcgctagttctgaggacacctcggggggctgttattctgcccaaaaattagtattttgttttacaaatgaggagtattcttgtctttcatatgaagggagacagctaccaaggctgtctggggctccagtgtcagggcccaggctccttctgtcttgttgctccagcatcaaatgtggctttttcttgtggcccaatatggctgcttgagctccatccttcccatctacatcccagtcaacatgtggaggaagggagggagggaagaagaaggaaatgctcttccaggagcatggtacatgacactcctgtctacatcttgctgccagaacttagctagagatgggcactcaatgcctcaaaaagatggatctaggccaggcgcagtggctcacacctgtaatcccagcactttgggaggccgaggcaggcggattacgaggttaggagttcaagaccagcctggccaaagtggtgaaaccccatctctactaaaaatacaaaaaattagctgggcatggtggcaggtgcctgtaatcccagctactcaggaggctgaggcagaagaattgtttgaacccaggaggcagaggttgcagtgagctgagatcgcaccactgcactctagcccgggcgacagtgcgagactccatctcaaaaaaaaaaaaaaaaaaaaaaaagatctggccttgggttagctgtatgcctggtcacaaatcaaatttcctattactgaaggaagaacagatattgaggccatgtcacagattgaaggaataagaagcacattgaagggatgacagagtcagagaggacatagatgtccaggaaaaagtggaatccagcctttctacaatctgggtacagtagaaagaaggggggtgtggtcactgataatggctttcaagatatcccggaacctgtgggtgaccttatttggcaaaagaaacttcacagacgtgattgagttcaggatcgttcaatcagaggttgtcctggaagatctgggtggaccctaaatggaatcactaggctccctagaagagggaggcagaggaagatttggctacagaggaggaggcaaggtgaggatggaagcagaggttggagagatgttatttgaagatggaggaggccacgagccaaggaacgcaggccaacactggaagctgaaaaggtcggctgagcagggtggttcacacctgtaatcccagcactttgggaagtcaaggcaggcagatcacttgaggccaggagttcaagaccagcctgtccaacatggcgaaaccccatttctactaaaaaatacaaaaattagccaggcatggtggtgcatgcctgtaatcccctctactctggaggctgaggcaggagaattgctcgaacccaggaggcagaggttgcagtgagctgagatcgtgccactgcactccagcctgggcaacagaacaagactccagcacaaaaaggaaaaaaaaaaaaaaaaaaagaagctgaaaaggtcaagagcatggattctccactggggcttccgtaaggaaccaatcctgctgacatcttaattttaatcttgtaagacccaagtcagacgtctgacctccacagctgaaagaacacatctgtggtgttgtaagccactaagtgcattgccattggttacagcaggcacaggaaatgaaaacagtaactctgccctaaaatctcccttattccctaagagatataactgggggaggagatcccctgcgaaggtgggtgttggctgaagtccttcagggaaccaaaatgattctggggggctgggagaggggacttccagtaggcaaggggcagattcgagtgactggtgtcactttgctcaaaagtagtagtaggctgggtgtggtggttcacacctataatcccagtactttcggaggccaagccaggaggattgcttgagcccgggagtttgagaccagcctgggcaacatagtaagaccctgttgctactaaaaatttaaaaattagcccggtgtggttgctgtagagagggaacagcccctgctactggggaggctgaggtgggagcatcacttgagcccaggcgatccaggctgcagtgagctataattgcaccattgcattccagcctgggcaacacagcaagaccctgtctcaaaaaaaaaaaaaaaaagaagtagtagtaataaaaagaatgataaaaatggcagtaataaaaagaataccaataacaactaccggcatgtgcatctttattgcatgccggactctccgctaatagccttacacacgtgttcttttatcttcatagctaccctatgggacaatgagtccatcaaaatgggctgcattttcctgcagtaacaaatgacctcaagtctcagcggcttacgcctgcgaaggctgattgcctgcttacaccgtgtgctcatcccaggacactttggtgctgtgcttgtcattgtcctcacccaggctgagagagcagctaatccctggctcattgccagtctctgatcccagggaaaagcaggtgggataggcaccggcacttagtgcttaaagcttcattcccagatgacacaggtcacaccactctctccctttttttttttttcctttctgagacagagtcttgctccgtcacccaggctggagtgcagtggcgtgatcttggctcactgcaacctccacttcccgggtccaaccgattctcctgcctcagcctcccaagtagctgggattacaggcacacgccaccatgccctgcttatttttgtattttttaatagagacggggtttcaccatgttggcaaggctggtctcgaactcctgaccttgtgatccgcctgcctcagcctcccaaagtgctaggattacaggcgtgagccaccacgcccagccacattttaaaattttacaagtgacttcataaagtagatgaaaacgttgcccttgtggagattacactccagtagagggagacaggcaataaacaatttaaaataaatgtagttgccaggcacggtggctcacacctgtaatcctcgaaacttgggaggctgaggcgggcagattgcatgaggccaggagttcgagaccagcctggtcaacatggtgaaacctcatctctactaaaagtaccagaaatattagctgggtgtggtggtgtgtgcctgtagtcccagctactcaggacactgaggcatgagagttgcttgaacccaggaggtggaggctgcagtgagctgagaatgtgccactgcactgtagcctgtgcaacagaatgagaccctgtctcataataataataataataataataataataattgcagtgattgaatgccatgcccagtaggtgctatggagacaagtacagccgggagggaggatggagtgaggcgggtgcccttttgaatagcgtgatcaggggaccctcatgcagaagcatttggtcgaagactcgaggaggagaaggagggagacatggtgatactgggggaagagcattcgaggtagagggaacagccagtgcaaaggaatatttgaggaatagcaaggagtggacagaggtagacggagaaagggaggagatgaggtcagagtggtcacaggggcaggtcatgggggcctcacgtaaggtctttgtcactaaatatataaagtgaatgattcgggtcactccctttaccctgagtgacatggagccatgggcagattctgagcaggggagggacatgacctgcctcaggtgttcacttctggacatcaatgtcatgggcttaaaacagtcacatggccagatccaacatcaaagggcacagaagtacactctgcctttggcaagtccgtggcgagggtatagatggagggaggggtgaagaatttgcatcagtaactggatcttccccaggagtcatcactgtagcagtggggttgggttttaaaccatgagaatagacaactgcatcacagatagatgcgggagaaggctggggctgagccctggggtagtccagtgtttttgattttttgtttttgtttctgttttttttttaattttattttatatatatatttttgagacagggtcttgctctgtcgccaggctggagtgcagtggtgtgaccttggctcactgcaacttccaccttctgggttcaagtgattctcctgcctcagcctcccaagtagctgggattacaggcgggcaccaggacgcccagctaatttttgtatttttagtagagatgggggtttcaccatgttagccaggatggtctcgatctcttgacctcgtgatccgcccgccttggcctcccaaagtgctgggattacaggcgtgagccactgcacccagcctgtttctgtttttgagatggagtcccagtctgtcacccaagctggagttcagtagcacgatcttggctcactgcaacctccacctcccaggttcaagcaattctccctgtctcagcctcctgagaggctgggattacaggcacctgccaccatgtccgactcatttttgaattttttagtagagactgggttttgccaggttggccaggctggtcttgaactcctggcctcaggtgatccacccgcctcggcctcctaaagtgctgggattacaggcttgagtcaccaggcctggcctttgtttttgtttgttaacataggatcttgttctgtcatccaggctggagtgcagtggtgccatatcatagttcactgaagcctccgcctcctgggctcaagagatcctcccacttcagcctcccaaagtgctgggattacaggcgtgagccaccatggctggcagatgccagtgtttagaaatgaggagggagaggaagaataagcaaaagagaccgaggaggagcagacagtgtcaggaggggacctagaccatggaaggacgtgaagaatgtgtctcagcagcagagggtcatcacccatgtcaccactgctgacacatcaggaaagatggaactgagaagttagttactcctggattcagcaacatggaggtcattggttgtcttgacaagagctgaatctgcagtggttggggcaaaagcctcattggaatgtgtggaaaagagacacaggggaagaggaagtagagacaagaggaagtaggaagagaagaagaggatggagacaatgcttgacaattgttgctgaaaagacaagcagaggaatggagtagaagctggaggggtaggggtggagatagaatttcttttctttctttcttttctttcttttctttctttctttctttctttctctttctctttctctcccttcctgccttccttctttgttccctctcttcctccttcctttctctcttttacttccttccttacttacttttcttctccttctccttcttctaatttctttctttctttcctttcttctttctccttccttccttcttccttccctccttccttcctcccttcccttccccttccttccttccttcctttccttccttcctcccttcctccctccctcctttctttccttccttccttccttccttctttctttctttctttctttctttctttctttctttctttctttctttctgtctctctctctctctctctctttctttctttctttcatcttgctctgtcacctaggctggaatgcacgatcatagctcactgcagcctccaaactcctgggcttcagtgatcttcccaccgcagcctcccaaaagtgctgggattacaagcatgagccactgttcctgtccagaatttcattaaataaggtgcaactgatgatgcaagaatgtggggagaactgtggagcatgttcttgagagagagggtgggacacagaggccaagtggagaagttgggcttggaaaggaggttggggatcatatcatattggaacaggaggatagcagagtatctaggcctagacgctgggaagtaagtagagctgctggtgggagcacaggggatttctcttctatggcttctgtgttttcagtggaagaaacaaagccatccgtgagcgtggacatgtgggaggaagagttggaggtttaagaagagaggacacagctgagagcggttgcccacgcctgtaatcccagcactttgggacaccaagttgggcagatcacttaaggtcaggagttcgagaccagcctgaccaacatggtaaaaccccgtctctactaaaaatacaaacattagccgagtgtggtggcacacacctgtaatcccagctcctcaggaggctgaggccagaggatcgcttgagcccaggaggcagaggttgcagtgagccaagattgcaccactgcactgcagactgggggacatagtgaaattccatctcaaaaaaaaaaagcaaatctggctagatgggcaaggcaggaagattgcttgagctcaggagtttgagaccagcctgggcaacatggcgagaccccgtctctactaaaaatagaaaaaaatagtcaggtttggtggcgtgcacctgtgttcccagctacttgggaggctgaggtgagagaattgcatgagctcaggaggtggaggctgtactgagccaagatcgtgcctctgcactccagcctgggtgacagagtgagaccctgtctcaaaaaataaaatgaaataaaataaaataaaataaataataaaataaaaaaataaaaataagcacatttatgataagttagaaggtgatatatgctataaaaaaagtaatacagtacaagatatcaggagcacttgtgtgtaattccaaaagtgctggaattacaggcatgagccaccgcgcccggcccaaaaaaactttaaaaacgggggacactgggtgcggtggctcacgcctgtaatcccagcactttgggaggccgaggcaggaggatcacttgaggtcaggagttcgagaccagcctaaccaccgtgctgaaaccccgtctctactaaaaatacaaaaattagccaggcgtagtggtgcacgcctgtaatttcagctacctagaggctgaggcaagagaatcgcttgaacccaggaggtggttgcagtgagccgagatcgcaccactgcactccagtctaggcaacagagtgagactctgtctcataaataaataaataaataattttaaaaaagaaactctagccaggcatggtggttcatgcctgtaatcccagcattttgggagaccaaggtgagggaatcacttgagtccaggagttcaagaccagcctgagcaatgtagtaagaatccatctctacaaaaaaaaaaaaaaaaattagccacacatggttccagttactcaggaggctgagtggggggcatcacttgcccctgggagattgaggctgtggtgagctgtcatcacccactgcactccagcctgggtgacagagccagaccccatctcaaataagtaaataaacaaaaaacaaaacaaaacaaaacaaacaaaaacagcttgtagagatgaaacaaagcaccctgctctagcagacagtggagttcagaaccacggagagcagcccagtggtgctgccttcccggcaactgtactagctcctctcatgggggtttccattggccaatcccttccttagatcattgttctgaagatgacaaggaaacctttaggatcaaagtctttgctgctattggcttgtcaggtggcccaatttgaatctgaactggagttcgtttgtatacacaatcataaaactaatttgtcctttttgacatcagaattggagatacatgaatgtaggatgtattagactgccttgtcattcaaagcaaggaattaattcttcccttacaaagcaaggaattaatttcttggggaaaattataaatctctgacttatttacctcaggcttggctatgtcacgtgtttttgccagtgaaatgggagaggaagtaaagtggtttgtatcatttcttttctttttttgagatggggtctcactctgtcactcaggctggagtgcagtggcacaagcatggctcactgcagtctcaaactcctaggctcaagcaatcctcctgcctcagccatccccctccccacccaagtagctgggactgcaggtgtgagccaccaaacccggctaattttttgtatttttttgtagagatggggtctcactatgttgcccaggctggtctcaatctcctgagctccaggaaccctcccacgttggcctcccaaagtgctgggatttcaggaatgagccactgtgctcgaccaagtgtgtatcatttctgaacagaaactccgagagccagtgcatcgtccactacgggctctactgtaagaccagcaataagatgcttaagatgattttggctgcaagtaacagggcaagaccctgttttttaaaaaaggaaagaaacaaagaaaaggaaggaagttttgaaaatagaggaaaagggaggggcaatttatggaggaatgagacaggaggggccagggccaggcaccggcccaagttaggaagaaagggcactcatccctcatgacagggagcagggcaagtgtggggccaggtaggagatgaggaaggtccacccagcagcttctgtgaagtagatggcaaagtaatgcatttggagaggggcagggtgacaggtagtggatatgaggaagcagagaagggttgaaaaagccagagtgaaactttgaagagacaagtgtttgaagaagtggtgttgccacaagagggggcagttgaaagagcctggtgcccccagatgattcatcccttctccgaccccatggacaccaaacacaagaacgttgacagcttcataccgtggcagctttggggaatggtgatggcagagcaggcccattgagccagagttcttcaactttgagggaaactcatctttccttttcatgggtttcatcaaggatgattttggctgcaagtaatagaaaaccctaactcatttgagaggctgacgtaggcagatcacgaggtcaggagttcgagaccatcctggctaacatggtgaaaccccgtctctacgaaaaatacaaaaaaattagccggatgtagtggcaggcgcctgtagtcccagctactcaggaggctgaggcagaagaatggcatgaatcaagaggtggagcttgcaatgagctgagatctcaccactgtactccagcttgggtgacagaacgagagactctgtctcaaaaaaaaaaaaaaaaccctaactcaactggcttttaaatttgtatatatatcccaagtagctggcattacaccacgacacccagctaatttttttatttttagtagagttggggtttctccatgttggccggctggtctcgaactcctgacctcaggcgatttgcccaccttgatctcccaaagtgttgagattacaggcatgagccaccgcgcccgactaacgcagaaactcttaacaaaatatttgcgcatagaattcatcaatagatcaaaagaattatacaccatgacccaatggggttcatttcagagatgcaagcccggttcaatatttaaaaataatcagtataatccaccaaaacaggtggaagaagaaaaatcacatgatcatatcaaataatgcagaaaaagcatttgccatacttcagcacccgttcatgattaaaaagaaaaactctcagaaaaagtggaatggaggggaactgcctcaacttgataaagaacatctataaaaagcctacagctgtggggccaggcacggtggctcatgcctgtaatcccagcactttgggaggctgagacaggcaggttgtttgagctcatgagttcaacaccagcctgggcaacatggtgaaaccccatctccacaaaaaatgcaaaacttaatgatggaagactgagtgctttctccctaagatgaggaagaaggcaaagatgtcctctatcaccattcttattcaaccacagtactgaaagttccatctggtgcaatcaggcaagagaaggaaataaaaggcaactagatcaaaaaagaagaaataaaactgttagcaggctgggtgcaggggctcacacctgtaatcccagcactttgggaggtcgaggcaggtggatcacaaggtcaggaattcgagaccagcctgaccaacatggtgaaaccccatctctactaaaaatacaaaaattatccaggcttggtggtgcatgcctgtattctcagctactcaggaggctgaggcaggagaatcttttgaacctgggaggcggaagttgcagtgagccgagatcacgccactgcactccagcctgggcaacaagagtgaaactctgtctcaaacacacacacacacacacacacacacacacaatctgtttgcagatgacataattgtcaacatagaaaatccaagtaatctacaaaaattctcatagcactgagtccagcaagatgagagtatataagacaaacatacaaagatcaactgtctacattagcaacaaatgcactcattctatcaagaaatacttacacctaaagtgtgccaggcactgttttgtgtgctggggacataaaagtgaacaaaacagacagaaatctcttttgattgttggttgtgtgggggttttttgtttgtttttgttttttggtgtttttttgtttgtttgtttttgtttgcttgtttgtttgtttttgagactgagtctttctctattgcccaggctggagtgcagtagcacaacctctgctcactgcaatctccgtctcctggtttcaagcaattctcatgcctcggcctcccaagtagctggaactacaggcacctgccaccacgcccagctaatttttttgtatctttaatagagacaaggtttcaccatgttggccaggctggtctcaaactcctgacttcaagtgatcctcctgcctcagcctcccaaagtactgggattacaggcatgagccactgcgcctggcccagaaatctcttttgaacaccaaaacaaaaaatacagctagcctcagtggttcatgcctgtaatcctagcactttgggagaccaaggcaggctgatggtttgagggcaggagtttgagaccagcctgggcaacatggcaaaaccccatttctattaaaaaaaaaaaaaaaaaaaaaaaaccttggcatggttgcacgtgtctgtagtttcagcaacttgggaggctgaggtgagaggatcacctgagcccaggaggtggaggctgaactgagctgtgattccgccactgcgctccagcctgggcaatagagcaagaccctgtcctcaccaaccccccaaaataccatttataataacttttaaaaaaagaatcgcttaggtgaaatctaaggactcatatagtgaaagctataaaaccctgatggaaaacattaaaggagacctaattaaaaggagagacacactgcatttgtggattggaagactggacggagtaaagacctcagttctctccatattgatatgtagacttaatgcaattcctattcaaaactccagcaagacttttcagatatagacaagattattctacaatttacatgaacgctaaaggaactagaataagtaaaccaattttaaaaagaataggccgggcgtggtagctcacacctgtaatctcagtactgtgggaggctgaggcaggtggatcatctgaggtcgggagtttgagaccagcctggccaacatagtgaaaccccacctctactaaaaatacaaaaattagccaggcatggtggtgggtgcctgtagtcccagctactcaggaggctgaggcaggagaatcactcgaactcaggaggcagaggttgcagtgagccgagatcgcaccattgcactccagcctgggtgacagagtgagattccgtctcaaaaaaaaaatttaaatcagcaagagaatcgcttgaacccaggtggcagagtttgtagtaagccaagatcgtgccactgcactccagcgtggacaacagaacgagactccatctcaaaataaataaataaaattaaattaaacatttttaaaaattaaaagaagaataaaataagaggaactagcctgctgatttcaagacttaggatacactacagtaactgacagtgttgttttggtagagggagagacacatagaccaacgcaacacaatagaaaacccagaaatagacccacacaaatacgcccaactgatttttggcagaggtgcaaagccaactcaattgaggaagaatagccttttcaacaaatggtgtttggaccaattggatatctataggcagaaaagtggatcacaatataaacctcagatcttacgctcaaaatggatcaaaaatttaaatttaaagtgtaaaactaggccgggcacagtggctcacactgtaattccaacactttgggaggccaaggtgggcggataacctgagcccagaagttcgagaccagactggccaacacggtgaaatacaaaaattagccaggcgcagtgacatttacctgttatctcagctactcgggaggctgaggcagaaggatcacttgagcccaggaggcggaggttgcagcaagccaagatcacaccactgcactccagcctgggcaacgggagtgaaaccctgtctcaaaaaaaaaaaaaaaaaaaaaaaagtgaagctagaatatatttttaaaagaacataggggaaaatctttgggatctgaggcttcggaaagagtttttacacttgacactcaaagcacgattcataaaatgaaaagctgagaagttggacttcatcaaaatttaaatttttaatctgtggaagaccccattaagaagatataaagagttggccggtgtggtgacccacacctttaatcccagcactttgggaggccgaggcggatgatcacttgaggtcaggagttcgaaaccagcctggacaacctggcaagaccccatttttacaaaaagtacaaaaattagccaggcatggtgttgcatgcctgtggtcccaactactcgggaggctgaggtagaagatcatttgagcccaggaggtcgaggctacaatgagccaagattgtgccactgcactccagcctgggcaacaaagcaagacccaatcttaaaaaaaaaagaaaagaaaagaaagaaagaaaagaaaagaagaagacagaaagacaagctacagattaggagaaaatatttgaaaaccacatatctgacaaaagactagtatctagaatatatatttattttttaaagcctctcaaaactaaaaagtaaaagaaaaacaataatctaattagaaaataggcaaaaggccaggcatggtggctcacgcctgtaatccagccctttgggaggccaaggtgggtgaatcatttgagcccaggagtttgagaccagcctgggcaatatagtgagactcctgtctttacaaaaaataaagaataaaaaaattagctgggcatggtggcacacacctgtagtcccagctactcaggaggctgaggcaggagaatcgcttgagccagggaggctgaggccacggtgagtcatgatctcaccactacctgcagcctgggcaacagagcaagaccctgtctcaaaaaaaaaagaaaggaaaggaaaggagagggcaggggaggggaggggaggggagagaaggggaaaggagaggggataaaggagaggagagaaaggaaaggggggaagggaaaggggaaaggaaaggaaaagaaaggagaggagaggagaggagggggagggggaggggaggggagggaggaaggaaaggaaaggaaaggaaaggaaaggaaaggaaaggaaaggaaaggaaaggaaaggaaaggaaaggaaaggaaaaagtctggggttggcagatgccagacacagaatgttcataattaattacgtcatcctaattcagtcccaagccccttccagctctctctctctctgtgtgtgtgtgtgtgtgtatgtctgtgtgtgtgtgagagagagagagaagatagggtttcactgtgttgcccaggctggtcttcaactcttggcctcaaatgatcctctcaccttggccttccaaagtgctgggatgacaggcgtgagccattgtgcccagccccttccagctttgttctgtcatttcagtatttcagtatttcagtttgtcagcctgagcctcagcctgtctcccctcataggcacaaggtggctgccacagttccaggcatcacatacaaagaggacaacactaacaagaggaaaatatgctccctttacctttcttcagagctgagctctaaacccaacaggttttatttcacagcctgtgccctccaacattttgccatcctgaagaaaggacaagaggcagcactccaatcaccactccattctgatcactagttccaggcctttcctcgtctttgggtatctccttttctttcctttcctttcctttctttctttctttttttttttaagagacagtctcactctgtcactcaagctggagcacagtggtgtgatcatagctcactgcagcctcaaactcctgggttcaagcaatcgaccctcccacctcagcctcctgagtagctaggactacaggtgtgtgccatcacacttggctaattttttaaagtttttctgtagagatggggtcatgcaatgttgcccaggctggtctgaaactcctgggctcaagcgatcctcctgccttggcccccacaaagtgctgggattacagacatgagcctctgcacctggcctacctttgggtattttcattttcatttttagttttgaatataaaatatttgagacccacaaaagaatatttgaagtgcacatgagtcacgcatcttaatgatcaatgaatatttataaacccatcactcaacttaaatcctagaacatcataatactattggagctacctatgtgtccttcctgacttttttttttttctttgagatggagtttcactcttgttgcccaggctggagtgcaatgatgtgatcttggctcactgcaacctccacctcccgggttcaagctattctcctgcctcagcctgcatagtagccaggattacaggcatgcaccaccacgcccagctaattttgtatttttagtagaggcagagtttcaccatgttggtcaggctggtttcgaacccctgacctcaggtgatccgcccgcctcggcctcccaaagtgctgggattacaggcgtgagccaccacacccggcctctgactttttgttttgtgttgtgttatccttccattgatttttccttctgtttaaccacactagagtgggtcgttttgttgttgagccttacaaaaatgttattttattatatgtagtcttctataggttggtgtttgaactcaacattgtattcctgcgtctgttggcattagatgctaagacagagctaggggtgtgaagttttttggtaggtgatgcctaaagaaatacaagggggaggaaatagaatctggcaggaggagcctgagaccatgatgttgatctgattcatctgggagaggaaaaaggtgaggtgggattgggcagggaaaggctcagaatgtgatattattttttttcctgtagacacggagtcttgctgtgttatccaggctgttctcaaactcctggcctcaagtgatcctcccacctgggcctcccaaagtgctgggattacaggtgtgagccaccatgcctggcctgaataagatgcatttctggcaatgttgaccaatgccacagggagctcagaacacaggtcattcattagaggagcctcccattgggtaggcacggcctgatctgagaagccatgctcaataatcactgatgtcttccccaggtcttggctcaaaagctgatgcagatcctgaaggcactgccctgcttgcaacagaatggcacggtcttttttgaagggatggctgggctcagtggctcacacctgtaatcccagcactttgggaggctgaaagaggctgatcacttgaggtcaggagttcaagaccagcttggccaacatgaggaaaccccacctctattaaaaatacacacacggccgggggcggtggctcatgcctgtaatcccagcactttgggaggctgaggtgggaggatcagctgaggtcagaaattcgagaccagcctggctaacatggtgaaaccctgtttctactaaaaatacaaaaaattagctgggcgtagtggcacatgcctgtaatcccagctactcgagaggctgaggcaggagaattgcttgaacctgggaggcggaggttgcagtgagctgagatcgtgccattgcactccagcttgggcaacaagagcaaaactccgtctcagaaaagaaatacacacgcctgtaatcccagctacttgggaggctgaggcacgagaattgcctgaacccgggcggtgaaggttgcagtgagccaagatcatgccactgcactccatcctggtggcactcctctttggttgccacagtgctaagatttatccatgtggaaatgtgtggtagttcatgttcctgctgcatggtattccacacccctcatttcagtgattcatttgttagcagctatttgggttgattctaattttttgctgttacaacaaacactgcaaagaatattctttttttttttgagataggatcttgctctgtcacccatgctggagggcagtagcttgatgatgacttactgcaacctccacctcccagggctcaagcaatcctcccacatcagcctcctgagtacctgggactacaggcatgtgccaccccacccacctaatttttgtattttttttttaatagagacagggtcttgccatattgccaaggtttgaactgctggcctcaaattatcctcccaccttggcctcccgaagtactgggattacaggtgtgagccacctcttcttttttgagatggagtctcactctgtcacccaggctggagtacaatggtgtgatcttgtctcactgcaacctccacctcccaggttcaagcgattctcctgcctcagcctcccgagtaacaggtgtgagccaccacgcccgaccaagtcacctttttcctcaaagaacattcttgtaccacctgtgtctctattgcatgtgtataagagtttctgttgatatatcttagatttggaatttctggctcatgcaatctgcatatattcgacaagatagtgccaaaatgttttctattagattctttaacacagcctttaaccttgtactacattcctcttttcatttaagctagcttgagtgggtttctattgcttgcaattctaacctacctaactcatcaaaaatgactttttgatgacaactctgtgacattcctcccaagaggtccccaccctgacaatagtcacctcaggtttagaactacaggaggttatgggtgaatgaggcacaaacacaagtttgacacgtccttagcaatacactcacactggctggacacggtggctcacacctgtaatttcagcactctgggaggctgaggcaggaggatcacttgagcaaaggaattcaagaccagcctgggcaatgtaaaaatgtaaaaaaaaatgtaaatgtaaaaaacaaaatgcaaaaaataaaatgtaaaaaaaataatagtaggccaggtgccgtgactcacacctgtaatcccagaattttgggaggccgagatgggtggatcacaaggtcaggagtttgagaccagcctggccaacgtggcgaaaccctgtcttctccactaaaaatacaaaaatcagcctggtgtggtggtgggagcctgtaatcccagctactcaggaggctgaggcaggaaaattgcttgaaccccagaggcagaggttgcagtgagccaaacttgtgccactgcactccagcctgggagacagagtgagactctgtctcaaaaaaaaaaaaaagtagtaaaaagactttttaaaataagataagacatacactcatacatgcagatcctcggtccatgatgatgccattttcctgctgctctgacccaggcacagcctccctctggacatcttattagttggcctaatgactgcttgtgatgtttaagtcatttgcaattaaatcttccacaacttgtaactgaaagcatccttagtgactttttcactcttcattcattctttcatattcttactctctgtccctccctctttctctctccctttcttctttttcttttctttttttttcttaaaggaggggtcagctggatgcagcggctcatgcctgtaatcccagcactttaggaggccaaggtgggtggatcacttgaggccaggagttcgagaccagcctggccaacatggcaaaaccccgtctctaccaaaaatacaaaaattagccagcatggtggcacacacctgtagtcccagcaactcaggaggctgaggcaggagaatcgcttgaactcaggaggcggaggttgcagtgagctgagatggcaccactgcactccagcctgggggacagagtgagatcctgtctcaaaaaaataaaaataaaaacaaaaataacaaaaagccagggtctcactccattacccaggctggagtgcggtagtgggatcatactcactgcagcctcgacctccctggctcaagtgatcctcctgcctcagcctcctgagtagctgggactacaagtgcacaccaccatgccaggctaattttttttattctttattttttatagagattggagtcttgctatgttgcccaggctggtctcaaactcctgtgctcaagcaatcttcccaggacggcctcccaaagtactgggataataggcataagccatcctgcccagctttctctctcctctgtctcacacacacacacacaaacacgcacacacacacacacacacacacacaaacacgtacagctacagtcacatatgcagacaagtggcgttcagtcattaataaagtcacatatacaagcaaggtcaatgtcacagacaaatttcttattgtttgttgtcacaaattgtataaaaagaacaagagcaaacattttttgggggcttcacaaacaaatagggatctggaggtggtaatctaggcaaggtagttggtgcatacatacctaaggtaatggatggtgctatggtttgaatatttatctcctccaaagctcatgtggaaaccaaatccccagtgtggcagaattaagaggtgtggcttctaagaggtgattggattatggattcgtggactaatggattaatgggttgatgtgttactatgagggtggcactggtggctctatttatttattcatttatttagacagagtctcgctatgtcacccaggctggagcgcagtgccatgatcttggctcgatgcaacctccacctccagggttcaagcgattctcctgcctcagcctcctgagtagctgggattacaggcttgagccaccacagtcagctaatttgtttgtattctcagtagagacagggtttcactatgttggccaggatggtctcaaactcctgacctgaagtgatccacccaccttggcctcccaaaatgctgggattacaggtgtgagccaactggtggctttataagaagaggaagacagacctgagttggcatgcttggtgccctcgccctgtgatgctttgcaccaccttagggccctgcagagtccccaccagcaagaaggccctcagcagatgaggcctctcgaccttgccgttctcagcctccagaactgtaaggaataaattccttttctttataaattacccagtttcagatattctgttgtaagcaacagaaaacagactaaaacagacagatggcaggtgggtctcaggggcagacacacgggtctccactggccacacacttcaggtcccaaatagagaggcagaaaaggccaggtgtggtggctcatgcctataattccagtgatgtgggagggctagcagggaagatcgtttgaacccagaagttagaggctgcagtgagctaggacctcaccacggcactccagcctgggtgatagtgtatgtctctcttaaaaaaaaaaaaaaaaaaggagaagggaaggggaaggttcaagacagtggaggcacgaggagccccagaactctgttggggagacactaattcgtgcacctgccatcctcccccaggacccaaaggacccgggtctgtcatcttcctcggggcctcctggagctggtgcagccagtggtggaggcggccccggggcctgggccttgctgaggctggatctgtgagcagaggagggcggtgtgtgaggcggggcctgggccaccacaggggaaggatgctgctcagagcccacagacctgggtgcccgggccccgaggactcacactggccccaagctgggagaggatgttgtggagggtgtgaaggagctggtccaggacatcccccagggccggatcagcatcagcggtgacctccaggaccttcagtgtcagggccagctcagcctccaaagccacagggcgctccctcacctgaagagaggtgagaaagagcaggtgagggggcgggtgaggggaacagatggggggaggaggatagagaggaacaagtgaaggtgacaagcacaggggagagggcacagccagtgtggtcaggtgggagtagagggaagggggagcaggtgtggggagaggagagagggacaagggagaaggagaagatgaaggggccactacagagccaggtgagtggggctgggagagcaggggtgggcctgactccccctctcacctgcagctgcctcaggtcccaggtcctggggaagaggcgggagcggcacctgcagtccttcagcagaagcgacacttcctagacagcaaaggcacaggttagccccagcaggaggggtggaggttagaccactctgatgggattggaggatggctgacaacaggatagggaagttaactggtgggaggatagtagaggaccctcttctacagaagaacatgcgtcagtccctgcagtaggagcatgagatagcctactgcagggagggtggaggctagcccagtgaaggaagctggaggtcttcgctcaacaaagtcagcatggtgacccatagagggtgatggaggctagcccacggcaggaggggcagggggagactcacacaggcctcgttctgtctattaaagcctgagctgcatggacttcctgtctggttcctgcgcctttttcaccagggggatgcagtgtcctgggctccacggctttgggtctctattcagtcttattcaaagtctctggcttcggtctcttcttctggatctccacctgctgctctgggtttggctgtttctgatttccagctcggtctggggtatcattcctgcctgagctccagggcacactgtttagctgggacagaggccagtcccacgggtgcagagcggcctgaggcaccggagggggtggggtgggggaggcccaggctggagaagtccagagcagggcggggccaggtgccgcagctgcccctggggaaagagaaagtgacacgtgcccgggccaggctctgtgttcgcctacaggaaggtgacttcctgaaccacacatgcctggggctgtagcagcttcagctcaggaggaggagccacgggtgcccccagggcaggactagggtttgagggggcgggtgaggggcttgtgtatctgcagattgctcagatgtggaggggggtggctgagggaaacccgggaagtatttccctgaggggtggaaggggggactctagaaggagactgcttagggtaggggagaccacccagggaaagggatactgtggggatgggaggacggagtcagtgaggccaagaccacagagtataaagaaaaggacaggccactttggtacgccaaggcaggaggatcacttgaagtcaggaatttgagaccagcctgggcaacatagcaagacccccgtcactacaaaaaaaaatttttttcgactagccaggcatggtggtgtgcccctgtagtcccagctactccggaggctgaggcaggaggatcacttgagccctggagttcaaggttgcagtgagccatgattgcaccactgcactgcagtctgggtgacagagctagacctcgtctcaagggaaaaaaggagagccctccctgcactcccaactctccccaacctgccatcagttggggggtgggggaggcaggaacaggggagtgacagtgtctactcaggaattcaggtacagctgagggcttcaaaggaagcaggttgattgtaacagacccattcctttattcattcattgaatctgtcattggttcaaaaagtatttattgagcaggaactatgggccaacactgtcctgtgcactgagggcccagcagagaacaaaatacacaaaattccctgtctctcgaggagctgacataccagtgggagagtcaggcagtaacaaataagttaaatatgtacaatgtcactgaaagaagcgcttttgagaaaaattatgctgcagatggagccggctgaacccagaagaagttgcctgctctaaggcagccagagaaggggacatctagttgaaaacctaaaggaggagggagggaacagcattctaggcaacgggaacagccagtgcaaagtgaggacaacgacaagtttctctaacggatgccaccctgtcccggaggctttacacatgcaagagcagtgaattctcccaacacctctgagaaaggtaccatgctttcttctaccttgaaaatgaagaagctggtactcagagaggttaagagacttggccaagtttacacagcaggtatgtgctaagagcagtctgagttttccctgacacccaggccttaacccctgcacctcctgccttcagaggttttgagtttttctttttttttttcttttgagatggagtctcgctctgttgcctgtcgcccaggctggagtgcagtggcacgatcttagctcactgcaaccttcacctcccagcttcaagtgattctcctgcctcagccttctgagtagctgaaaaccatgtgtattcctgggcctgtggatttggaagggcagggaaaaccatgtgtattttcatttggaagggcagggaaaaccgtgtgtattttcatacaggcatccgccaccacacctggctaatttttgtatttttagtagagatgggggtcttaccttgttggccacgctggtctggaactcctgacctcaggtgaccctcccacctcagcctcccaaagtgctgggattacagacctgagctaccgtgctgaccagaggtattgagtactttgaagatacttttctgagtccttggtcacctgaattctgcccatccagggagtcccttgaggaaacctgggggctgatcttgccatgtgcacatgtgctccgaaaccctcttgcccctccatcctcagcattattagatatggagactagtactggccaccaaacccaagactacattctctagcatcctgcatgctagggatgaccatgtgactaacccatcaccaccatctaggccttaaaacacagggtgggtggtccctgctctgtttcctattgtcaccactgaaaaactggacatgtctgagagccgaatcctgctgtacaggtgagaacaaactccaggacagggcttctaacctggcagaagaattcctgggcctgtggatttggaagggcggaaaaactatgtgtattctcactaacctctgtctgaaatttgatatttcctgaatgtatgtttcttacacctgctgtaacaaatgacccccaacttagtggggtaaaacaactcagactttccagggatggatagacggatgggcaaaatatagtctacacatatgatggaatatgattcagccttcaaaaggcagaaaattctggccgggtgcggtggctcccacctgtaatcccagcactttgggaagccggagcaggaggatcgcttgaatccaggagttccagatcagcctgggcaacatactgaggcctcgtctctataaaaaatttaaaaattagccagatgtggtagcacacatttgtagtgctggctactcaggaagctaaggcaggaggatcacttgagctgaggaatttgaggctgcagtgagctgattgcacaacagtactctagcctgggtaacagagcaagaccctgtctctaaacttaaagacagagagagagagtccaggcgcggtagctcatgcctgtaatcccagcactttgggaggccaaggccagtggatcacctgagatcaggagttcgagaccgacctggctaacatggtgaaaccccatttctactaaaactacaaaaaattagctgggtgtggtggcagacacctgtaatcccagctactcgggaggccgaggcaggagattcacttgaacccagcaggtggaggttgcagtgagccaagatcgcgccactacactccagcttgggcaacaagagcgaaactctgtctcaaaaaaaaaaaaaaaaaaaaagagagcaagaggagggaaggaagttctgacacatgctacaataaaaatgaactttgaagacattatgtcagtgaaataagccagtctcaaaagaacaaatgctgtatgattccccctacatgaggtgctgagagaagtcaaattcctagaaacagacgtgtctaaatatttgccggggtagcgggaggggttaataggaagttgttgtttaatgggtacagagattcaattttgtaagatgaagagagttctggagattgcttgccgaacaatgtagcaaacaccactaggaccagacctgtaatcccggcactttgggaggccaaggggggcagatcacttgaggtcaggagttcgagaccaacctggccaacatggcaaaaccccatctctactaaaaatacagtaattagccaggcatctgactggctaatggcacacacctgtagtctcagctactcaggaggctgaggtgggaggatcacttgagcctaggaggtcgaggctgcaatgagctatgatcatgccagtgccctccagccagggtgacagagcaaggtcctgtctcaaaaaaaaaaaaatagaataaataaataataaaattgcactactgaacaatgtgctttagaaaggataagatggtacattttgtgggtttcccacaattaaaaaaaatatttaaattacctgaacaaaaagaacaaaacaaaatgcatgcacatttctattcctacagttctgacagtcaagatgtcagcagagcgggttccttctggaagcagcaggggagatctctctcctttctcagcctctgggggtgtccagcatcccttgaccccggttcccttcctgacatcactccaatgtcctgtttctgtggttacatcttccgctaatgatgctgaccccggcctccttcttagaaggacttttgtgatgacattgggtccaggtggacaacccaggataacgcccccatcccaaacccttaacttactcacatctgcagagtccctcgtgccatggaacataacatattcccaggtccaggaatcaggaacatctctggggaccagtcttgcatctagcacgaatccattacaaatgcagcaacacaccacagcagtgttagcagaacttgtgactgttaccaaaagaaatcacaggcatttcctatcacgttatcttccagcaggcaccttgaaatgtcatttatgctcatctctgcttctaagtcacagtggttattaaagctgccacaggtgattttttacttaatgcattcatgaagaagcacatgaattgctatgtcacagtgtgaaaaaatattttgatcactgtattacaatcagagttggattcctttgtcctgcacgtgttctttccttctgagaagggtccgtaggcttttcaaggctgccgtgaggtccggtgggtgaagatgatgagggagccctgtcccggggactgtggagcacagaactgccaggaaccagggcccctggatgactgagtggggccatcctgccagggggagcgctcaccttgggaggaggagctggtggagaatgacactctgtggtttgtaattcatgatcactgtatttgggggactctttgttccagcagctcagccaactctactcagcaggggtccctgatccaagttgtcctcctcatctgtaggggcttatccagggttagtgagacctcatgtttgcttatacaattcaggggcttcttggaaagagaatgggctggacccggtgactcaagcctgtaatcccagttcggggaggggctggagagggtggaggatggtgccgaggagagagaatcacttgagcccaggagtttgaggctacagtgagatgtgatcacgcaagagacaggatcttgctgttgctcaggctggtcgtgaactcctgacctcaaacagtcctcccatctcagcttccaccagtagctgggattatgggcttgtgccaccacacccagccaattctctaattttttatagagacaggatcttgctatgttgcccaggctggtctgggctcaagtgatcctcccaactcagccacccaaagtgctgtgattacaggcttgagcaatcacatccaggctctaaattaattttaaagatgcttcatttcacccaatacatccaaagtgctatcatttcaacatctaatgaatatataaattataattaagctgttttacttttttttttttctccacagtaaatcttcaaattctggggtatgttttacactcactgaaaaaatgaggttgcaccacctacattccaggtgctcgatagtgacatgtgacctggggaccccagtggacagcacagactcaatgaacctgctgttctagatgctacttttagggtaatttgttatggcagcaatgcaaaggaaatacacaccaacgcacacacagtcccacgtcatgggtgtcttttcctcattgtttatttcaacaaggatttcaaaaagtagaaaaataaacattttcctggaggtgagttggatttacatacacaaatacataaatagcgactgggtgacaataaattaagccaagtggctaatttataaataaaatctcaggttgcatgactggcggaagggtcagacacacaggtccccgctggcaacacaattcaggtctcgcgtgaggaggcggaagaggttgaaggtgacagaggcctcgaggcagccaggggactcctgtagggaggaggggatgggtcaggggctgtctgggttctgggctcccagtggctccccagacctcagtccctctcttcccgggtcactcaccttttttggggcctcctggagccggtgcagccaatggtggaggcggccccgggtcctgggccctgccgtgggctgaggctggatctgtgggcagaggagggcggtgtgtgagccggggccttggccaggggaaggacgctgctcagagctcacagacctgggtgcccgggccctgacgactcacacaggcccggagctgggagaggatatggtgcagggtgtgaaggggctggtccaagacatcccccagggctgggtcagtgtcagcggtggcctccagaaccttcagcgtcagggccagctcagcctccaaagccacggggcgctccctcacctgaggagaggtgagaaagagcaggtgaggggggaggtgaggggaacaggttgggggaggaggatagagaggaacaagtgaaggtgacaggcacaggggagagggcacagccagtgtggtcaggtaggagcagagggaaggggtagcaggtgtggggagaggagagagggacaatggagaaggagaaggtgaaggggccactacagagccaggtgagcagggctgggagggcaggggtgggcctgactccccctctcacctgcagctgcctcaggtcccaggtcctggggaagaggcgggagcggcacttgcagtccttcagcagaagcgactcttcctagacagcaaaggcacaggttagccccagcaggaggggtggaggttagaccactctgatgggattggaggatggctgacaacaggataggggaggttaactgctgggaggatggtagaggaccctcttcttcaggaaaacatgagtcagtccctgcagtaggagcatgagatagcccactgcagggagggtggaggctagcccagtgaaggaagctgggagtgggaaagcatggtgacccttggagtgcgggtggaggctagtccatggcaggagggcagggggagactcactaaggcatctttggccctcttaaaggcctgcagctcctgtggagacagggacttgaactgggctatgtggcagccccttgcatccgggagagccccgcggagcctggcgacaggaactgctccagtcacggtcagcactgcggccatcagcaccagcactggcatgcagtccccggtcatgtctgtgtcacagagagaaagggagctgagggaatgcagaggctgcccactgagggcaggggctgcaggagctgagcacggacagagatgtgggactcacctagtttcattcctgatctctggtctttgtcagcagaagaaacactctgaggctgtcacccagggtctgtttgggtcttgtctggagtctctgttcttttcagtcccctcttctggatctcagactgtgtcctggctttgactctttctgtcagttttgagctctgtctgggatgtaattcctgcctgagctccatggggcagcttttatccctgacagaagggcagtcccagctgatgtaggaaaagtgaaaacacagcctcaggtaagacaccggccaccaggggagccccaggctgggaaagcccagagcagggcagggctagtgagccagatgagcagctggagggaaagagaaactgatggagactcaggggtaacctacaggaaggtatgttcccaagaggattccacctgctctggttttgttgttgtttaagacagggtctcactctgtcactgcagtgcaatggcatgatcacagctcactgcagcctcaaactcctgggctcaagccatcctcctcacccagcctattaaagtgctgagattacaggcctgagccaccactcctggcatatatatatatatatatatatatatattttgagacagggtcttgttcggtcacccaggctggagtgcagtgcaaaatcttggctaactgcaacctccgcctcctgggttcaagcaattctcttgccttagcctcccaagtagctgagattacagatttgtgccaccattcccagctaatttttatatttttagtagagatggcgtttcaccatgttggcaaggctggtctcaaattcctgatgtcaagtcatctctctgtctaggcctcccaaattgctgggatttcagtgtgagccaccatgcccagaggccaatatttcttaattgcccaggcaaggaaggactcaggaatatgaggctctgctcaagaattgaggtgtgacgaaggacttgaaggacaccacgtgggtgccgtctttcttagggaagttcaggcagtggtgaagagcatgggtcttggagatgaagggtctggggttcaaacctggttctgaccctcactagccgtgtgaccttggcaaggaggggtgcattcagcaacgcagattgctaatgcacagatttggagaaaaaattaataacacaattgtttgtgtatttatgtgagtgattatttaatagaatccactcattaagaccatactaggacctcagctggagagtttaaaacgtgatctcaacggacactactcctccacaaggcaagtatgctaacccatcctataggtgaggaaacagaggctcagaaaagtaatttgccctgaattccactgtaattaactggcagggtcagaactgaaactcaggccacctgagtccctggctcggcctctttttttgctgtaaggtgcacctcacaatcatcatacggaaaacaaccaatgcgatcaaaacactctttgataactggcaataaatttaaaccgggagacagaatagcaaatgcacaggaacttcacaaatacaaacacacgtaagggaatccaaagaaccacagtcggttaaggacccttgggcctttcactaccaaatccctcatggattggtgtcccttagatgccggatccaagagtcacggattcacagaatctcaaagctggctgtggggctacaaatccggggttaggacctggtgttgggggtgtcctggtaaccacacaaggaggaactggtccctgttgcctggggtcagccacggtttccagagctcaagttttttcctgccacagcaaccgttggagggtcgtacaatgcaccccgaggaaatatcgtggcttcctggagaactgtggtctcttccctgtagaaggacccgctcctcttatatctgagacagtggatccaagtcaggcccaaggctgcgaagaagttttcgtgcctcagcacccattgactgagagcctcgcccggccagcccaatggacgacaggagctgctttcggcagccaatggcgtggaggtttccgtgctgccagagggggcggggtcagaggcaaggcccagagtgtgcagccagccggagctcccacgtgagcaggcgcaggaggttgaagaccacgctggctttgcggcaccgaggcgagtcctggagccagggagggagggcagcggggctaagccaggctcttccccccgcccccggaatccccctccagtcccgctgctcgcagcctcagtcccgtccttgtcagcctcgcctggtcctccctgcgggctaaccctgtattgcctgttgcactcaccgctctccggggtttgtgacgcctcttctgggccccggggaccttcctggaggagcctggccgtgccagctcaagctggaggtgggacatgaggcaaatggaaaaggcgaaggacgaagcccctctctgcatctgcccgtggccctcccagccgcagactcgagcccggatttcaggacacccagaggacccgactccggtctggatgggtttttccgctaagcaggacagattggcaaagcgctggggctcgccgtgggcctgaggatgcagagaagctggcgggggagaggggcggcggggcgcggccgtcactcacgcaggccgccacatccctccccgcggccgccagcagctccaggatcgggccggcgccggggagcagctccgagcggtgcaggccgctgagcactgcctgggcgtccgcgatgccccgggccacgtggcggagccgagcgcaggactgcggggacgagagggcgttagagcgggccgcgcccgggccatgcctctcccgcccactcccgggcctcaccgatggccgcggaggatccctcctggggcggaaggagcagttgcgctgcccccagctcagcgcctcttcctcctgcgggacaagcggcgcttatcgcatacggctaggccccctcgccagggcccctaacctctgcacagtctgggattcctggacgtggatgggtactggcagcgcacggtcgtgcctgtcgtgtactgaaccagggagctccccgaaggcgcgaaccagggttgaattgcactccgcgctcccccagcaaagcccctcgccccgacctggagccgagtcctcccggcagggctcccttctgtgattgaccctgagcctgcgttcgcgctgacgacggggactgcgggggtctcgtggtgggaattgtgggcgctgacataggagaggcgcctgctgggcgctaggacgcaggaccccttgggacaggaacgggtgtatgggaacccggtggggccagggtcccagggggcacaggggctgggcggtgacttacgtagcggtccctcagcgccttggcagccgccagcgtccggggctccagcgagcggtagtgcgagagcaggcagcgccggggggccttctgcgatcaccgtgcacaggacccacagccccgcggccactgcggcccagacactcggccgcatctctgcttctgcagcaggcgagagacgtcagggaagccaaagagagggtccagcgcgtccagccccccgccttgggttaggatcccagggaaggcaatgctcggagcgtgaaggcacagcacacacagtgggagagagagtgggagccggccccctcctcgccttggcctctgccctcactcctgtctgcagtgcaccctctgtgcctcgtgctgcagcaggtgctgccgtccactgtcccctgggaggcgtccagagccgtctccacctgggcaacagtgcctcgacggtccatgctggcttttatgcgcagggctgagaatggggtttgcagccgggctttcccgtccagggcaagctttcccaacatcagagctggccccaggcctctgggatcccagtcgggtgtgaggacttcaacccgaggttggcctgtgcccgggatggctgccctccaacactcggtttccaaattgtctctgtccctgtttctactgtctgtttcctctttctttgcttcaccctggttgtctttatcttcgttctgcaatcacaaccagcccttgtgtagtgttgactgtgcatcaggctctcttctatgtaattgacacagacatatcatctcatttttgtaccagggcagccctggaggtgtagctgagaaagagaacgcttaatttattttattttattttattttatttcagagacagagtcttgctttgttgcccagcctgtagtagtggtgcagtcacagctcacttcagactcaacctcccaggctcaagcaatcctcccacctcattctccatagtagctgggactaccggtgggtgccaccaccattttttgtagcaacctggtttcgccatgttgcccaggttggtctctaacgcctgagctcaagacatctgcccgcctcagcctcccaaaattcttggattacaggcatgatccattgcacctggcctcattattttcttaaaccgtttttttctagtctctttatctatgggtgcattgattaaaagaactgcagatgcccgaaaggccacacgagcttcaggacgcttcctttgcttattactggaggaagaaaaggctggggcaaaacaagtgcaaaccagacacagtgacccacggttacctttagatcattaatatataattatcatggtaaactccctacccatggaggaaaatacgctcaccatttgctgaacatacatcatatgaagaggcatgcttatgatctgcacctgcgtctggagttgctctctgcgcatgcttacatacctccccaccccacagctaactccttaaaatttcccagctccccacagctgggcgataaggtgttttttgttttttgttttttttgagatggagtttcacccttgttgcccaagctggagtgcagtggcgtgatctcggctcactgcaacctccacctcccgggttcaagcaattctcctgtctcagcctcctgagtagctgggattacaggcacatgccaccatgcctggctagttttttgtagttttagtagagatggggtttcaccatgttggccaagctggcctcaaactcctgacttcaggtgatccgcccgccttggcctcccaaagtgctgggattacaggcatgagctcgcccagcaataaggtgtctttagagcaagagttctctccttccccatcctagctaggaataaaacctgcttgcctttttgtttccaattgggtgttctttctttgcaaccaatgcagagtagggaaagaactgcatttacaggtgacaatttcattgtcaaaaatgacacaagcccgggtacagtggctcaggcctgtaatcccagcatgttgggaggctgaggagggaggattgtttgagcccaggagttcgagaccagcctgggcaatatagtgagaccctgtctctacaaaaagtaagggatttaaaaattagctgggcatggtggtgttactggaaaagcatcctgatccagaccccaagagagggttcttagatcttgtgcaagaaagaatttggggcgagtccacagtgcaaagcaaaagcaagtttattttaaaaagtaaagtggtggctgggtgcagtggctcacacctgtaatcccagcactttgggaggccgaggcaggtggatcacttgaggtcaggagttcaataccagcctgaccaacatggcaaaaccctgtctctactagaaatacaaaaaaattagccgggtgtggtggtgcacacctgtagttccagctacttggaaggctgaggcaggagaattgcagtgagccaaggttgcgccactgcactccagcctgggtgacagagcgagaaaaaaataagcaaagtggcgaaggaatagctactccatagacagagtagggtgttcctgaaaataagaggaggaatgggcccaccctaggtacaatgcttgtttataacaaaaaatatcatggggagatgtgctctgctaccagggtttgtgacaaaggattaaatttcttaattatcatattttgcaaaaaccgatattactatctttaaagcaaaacgaggaatgcttctgatgaagaatgcttctgttctcaagataccgagatttcaggacattcctgagcctgagtctctttagtaaatgttatcaatctgttccattaacagtaaacatctagaggctaggaatgcctaacttcctggaaatgcagctcagcaggtcccagcctcctttttcctagccctcactcaagatggagtcgctctggttcaaatgcctctgacagtggcacacacctgtagtcccagctactcatggggctgagatgaaaggatcccttgagtctgggaggttgaggctgcagtgagctgtgattgtgccacggcactccagcctgggcgacagagtgagagactgtctcaaaaaaaaaaaaaaaaaaaaagacacaaaccaggcacagtcgctcatgcctgtaatcccagcactttgggaggccgaggtgggcagatcacctgaggtcaggagttcgagagcagcctgaccaacatggagaaaccccatctctactaaaaatacaaaattagccaggcatggtagtgcatgcctttaatcccagctattcgggaggctgaggcaggagaatcacttgaacccgggaggcggaggttgcagtgagccgagatcacgccattgcactccagcctgggcaacaaaagtgaaactccgtctcaaaaaaaaaaaaagacacaaaagggaggttctattaccttattttacagatggaaaactgaggcccaggaaagtaaaggaactgttccaagatacacagctaataaatggcagaggtggggtttgaacccacacactctgcagtttcaaagcttgttctctatgccataactgcccttatctttttcagcgtctcctcctgtgtcttgctttctctttctctctctctctctgttcctgtctctgtctctggcgtgactccatctttcttattcatttttccaacaagcatcctgccccaggtcgctctgtctgtctcaatcaatctctttttgtttaaacataaaatctacttctttttctgataaaattagccatgcatgttcagtggataaagcttgaaaaatacacaaaaacataaaagaaaaaaaacatcacctataacttcaccatcctcctctcatccctcatcccacttctggaacaaatcgtcccaatacataggaattttccatgtgtttatttgtgcatatgttttctgactaccaaagtaacacttgttccttgtaaaagattccatccatacaaaaacatacaacatggagagttaaagtaagtcttgtatttcacctcctggaggtaaatattttttaacaatttgtcactgttcctccttttgttttcctttctgtgagcaatttcacccaaattggaaccatgctgtatacagtttggtagctggctttttatgtcttaccattatctctcatttgcattctcccacatctttaattatagcgtatcagttagggcccagcaggaaacagatggcccgtcaatttaggataatttgaggtggggttgataccagaagcctttataaagcgattggatagtaaaggcaaatgacaagagctagtgcaagctcctggggccagcatgggtgaggggcctcatccacaggcctaaaggaaggggagagggttgagggtgtgcatgtggttgcctgacttggggaggagagagtcacttagatttgtggaggaaacagatgaattgtggtggcccagcacagggaggagccctggggaaaaaacacctgacctcctctcccctctacctggggcccagagtaggttggagaagcagggacagtagataaggaggggcaaacggaagacatcccccacccccacaccactattagagcttccattccagcaggatcatttaataaccaacccctgattggtagggtggcaggtttttcatttcctcaacagtgtcttttgcagagcagaggttgctttttgtttttgtttttttggacatggtctcagtctgtagcccaagctggagcatagtagtggcacaatcgccactcactgcagcctccatcacccaggctcaagccatcctcccaccccagcctcacaagtagctggggcgccagctacctgtagtaggcacgtgccaccaggcccagctaacttttctttttttccccagagatgcagtctcactttgttggccaggctggtatgtttccattccaacattcttgagatgacaaaattatagaaatggagagcagattagtggttgacagaggttaaggaaggggtcggatgggagaggagtggacgtggctactgaaagggcaacacaagggatcttgtggtatggagtgttttgtatcttgtctgtatcaatgtgatatggttaggctttgggtgcccacctaaatctcatcttgaattgtaatccccaggtgttgagggacagacctggtgggaagtgattggatctgatcatgggggtggttcccccatgctgtccttgtgatagtgagtgagttctcacgagatctgatggtgttttaagtatttggaagttcctccttctttcactgtctctctctcctgccaccatgtaagaggtgcctgctttcccttccatcataattgtaaatttcctgaggcctccccaaccatgcagaactgcgagtcaattaaacctctttcctttataaattacccagtctcaggtagcatcttcatagcagtataagaatggactaatacacaatgtcaatattctctatgtgatataataccatggttttcgcaagatgttaccattgggggaaactgggtaaagggtacacagtaactctttgcattcttttttttttttttttttttgcacgtttcatttgtttattgatttccgcctgattactccagaaggtaattacttaagatgcttaagatgggtgggggggtgatttcagcatcgcccaccttcacctgtgggaagacctccgagcatgtacagtaagacacacagtcatatcttggggagctctctgcaggtgaactgcaggcccccagccccatgctgggtaaagtaatgaagcaacagccgctttcctaagcccgagtgacccaagctacttctgcgcaggttgtgaaacagggtttaggtttctcccctcttggacaagaggccaggggtctgccccatcagcctgctttcctggtgggtcacggaccatcatcacctggctggtctggaagggtttaaccacagcggatcatgtggcgaccagagccggggcagctgtcaagggcagcctccatttccattctgtctcgtaagcagcctgggagatgtgggcctaagctttggtgaggatgagagtctgtcttgaaattgggccccacaggggtgagtccagaggcaggaccgggaaggaaaggtcgaaggtcgggcgtaacatcattcaaagaccagccacgcccagaccacacccctgagatgccttatcaggtgagcaggaggctaagtcagccgacagtgtggccacacagcccaagcctgtcctagcagaaggcaggaaccatcagcaaataagtgacttttccaagaaacaagatcttgttcagagctgcggccttgggagccttgatgtttcagccattgtgccctgccttcctgtctcaatgtccaggtctcgaattccatggtagaatggccagtgtgtggccttagtgccgtggccatctggggtcggtgtgggctgcccgcctagtgcgcctgggaagcagaagtttctttgcctttagggacaaacttcagcgagctgctgaatattcattcagaatcgggactgccgcagcttggggccatcgttcaggaacttgtggctcaacgtgttgccacacttgcacgagacaccttcaagacttcaggatgattgtgctctgggcgcttggccacgctgtcagaacggatggtcttggtgaacaccggccaggggaatgagtatgtgtactttgagcggctgggaaacagctcatagccacacttggcacacatatagacgcctggctcaaagtgattctggaaaaccttgcccccgaagaagctgcagaatgacatggcgccgccaggaccactgtgcacttgccccctccaacagacccaaggccgctgaccccatgaccactgggacccgcgcccacctccctgcacctcccaagaacctatctctttgcattatttcttacaattgcacgtgaatccacaattatgtcaaagtaaaaactctaattaaagcaatcatacagacatatttccttgggaaatatgatttcctaaatcatgatttcctaaatatgatttaggaatatgattcctaaatatgatttcctaaatatgatttcctaaatatgatttcctaaatcatacagacatatttccttgggagctatacatgcattatgcaaatatataaaatatggataatatataaaatgtttagaaatgtataaaaaagtgtgcaaggatatgtcccaaactgattaatagtgagttatttatcactggagagagcatgggaactgaggagatgatcactggaatatttaaatgtattagcaatattttaatttctttttttttttttttttttttgagacggagtcttgctctgtcgttcaggctgccgtgcagcggcatgatcttcgctcaccgcaacctccgcctcccaggttcaagcgattatcctgcctcagcctcccaagtagctgggattacaggtgtctgtaaaaattagccaccacacctggctaatttttgtatttttagtacagatggggtttcaccacgttggccaggctggtctcgaactcctgacctcaggcaatctgcctgcctcagcctcccaaagcactgggattacaggcatgagccactgcgcctggccgtattttaatttcttacaaggagaatgaattctgcctaactaaacagtaaaacaaacaaactcactggatatgagggaaatggtagctcactgcttcttcagttgctggtcgggtagatcatttgtgagactttcttaaaaagtacattaatccaatttctagagcttctctttttgtttttttgagacagagtctcgctgtgtcacccaggatggaactcagtggtgaaatctcagcttactgcatcccaggtacaagcaatcctgctacctcagcctcccaagtagctaggattacaggcacccaccatcacacctagctaatttttgtgtttttagcagagacggggtttcgccatgttggccaggctggcctggcactcctgacctcaagtgatccacccaccttggcctcccaaagtgctgggattacaggtgtgagagtccctgcaccaggagagactggcctctagagcttctgataatggctttgtaaaacgttgtccttatcctctgccactttgctgctgtgtgggtgttcactgacccctcctgatctgcacctctgaggcttgcctgccctcttgcttatggttggtgtttagccagtggaggtgctggcaggagattgagggagggcagagagcaaggtgggggtgtttattctcctatttgctggctgccccctgcaagtctggagttagacagtggccgtgatcctctatctacagccacagtctttgtcctgtcatgcctaggagtgctaacagctccccctgttacttgcctctgggtgcaccaccacctcttgtgtcttccttaaccctgcccacttttcccgtgcttaaatgttcaagtaggtcatctacttcctgaagatttctattttttttcccctgagttttcttaatagaaatgtttgagactgaggtcattaaagactcacatgctgctataagcaaaaattcaggctaggcttggtggctcatgcctatgatcccaacaatttgggaggccaaggcaggaggattgtttgagtccaggagttcaagaccagcctgggcaacatagcaagagcccatctccacacacaagatataaaaattagctgggtgtggtggcacccacctgtagtttcaactactcaggggcctgaggtgggaggatcacttgagcctgggaggtggaggctgcagtgagccgtgatggtgccactgcactccagcatggtgacagagcgagaccctgtctcaaaaagaaaaagaaagaaagaaatattagagattctgtgcaccctttatccagtttcccccaatggtaatatcttacaaaatgctagtccaataccgcagccggatattgacattaatacagtccacccatcttattcaaatatccccagttttacttgcattgagtgtgtttgtgtattcttgtgtgtgtgtttagtcatacagtttactgtatacaatttagttatataatttcatcacatgcttaggttcatgtatgcatcaccacagtaaagacagaagagttccatcaccatgaatatccttggggccatgccatctttttttttttttttttttttgagacagagtcttgctctgtcgccaggctggagtgcagtggcgagatctcagctcactgcaacctccacctctcaggttcacaccatgctcctgcctcagcctccagagtagctgggactacagatgcccgccgccacgcctggctaatttttggtattttttttttagtagagacggggtttcaccgtgttagccaggattgccttgatctcctgacctcgtgatctgcctgcctcggcctcccaaagtgctgggattacaggcgtgagccaccgcacctggcccttttttataaccacacccaccttcctccctccaccatctttccctaactccttgaaacaactaatttattctccactttcaaatttttctcatttgaaaaatgttatatagcccaggtgcagtggctcatgcctgtagtcccagcactttggaaggctgaggtgggaggatcacttagagcccaggaatttgagaccagcctggacaatatagggcaaccctgtctctacaaaaaatacaaaaattagccaggcacggtggcatgttgtagagtctagccccaatggcctgtgggttttttctttgtgtgcagagacgagagattgtaggaaaataaaaacacgagacaaagagatagaaggaaagacaactgggcccaggggaccactgccaccaatgtgcggagtctggtagtggcctcaaatgcctggacgcactgctatttattgtatacaaggcaaggaggcagggtaaggagtatgagtcatgtcaagtgattgataaggtcacgtgagtcacgtgtccacatgacagggggcctttccctttgtggtagctgaggcggagagggaggacagcatacgtcagcattttttctatgcacttatcagaaagatcaaagactttaatactttcactaattctgttactgttatcttctaagaactcaaaaagaggagccaggtgtacaggcggaacatgaaagtggacaaggagcgtgaccgttgaagcacagcaccatggggagacgtttaagcctccagatgactgcgggcaggcctggctaatgtcaggcctcccacaagagctggtggagcagagtgttctctaactcccccagggaaagggagactccctttcccggtctgctaagtaacgggtgctctcccaggcactggcgctaccgctagaccaaggagccctcaaacggcctttatccgggcgtgacagagggctcacactcttgtcttttggtcacctctcacagtgtccctttagccctgactctgtacggcctgttttctcctaggttataattataaaacagaaattactataataataaaacaaagagtaatactacaaactaatgattgataatattcatatataatcatatctatatcctatttctagtataacttttcttattataattattttctttattatactggaacagcttgtgccttcagcctcttgcctcggcacctggatggcttgccgcccacagcatgtgcctgtggtctcagctactctggaggctgaagtgagaggattgcttgagcccaggaggtcaaggctgaagtgagccatgattttgcaactgcactccagcctaggtgacagggcaagactctcaactttaaaaaatgtgtgtgtgtgtgtgtgtgtgtgtgtgtgtgtgtgtgtgtgtgtatgataatgaagtagtatgtaaccttctgggatgggcttttttcactcagcataattctctggatattcatccaagttgttgcatgtatcaatagttcattcctatttgatggtatatatttgccagaatttgtgtaatcatgcaccttttggaggacaactgggctttgtagtttgggctattacaaataaagttgctgtgatcatttgcaaagcaaataactatgttattgcatggacataggtttccatttctctggaataaatatccaggcataccattctgggccaactaggagttgcatatttagttttacaggaaactactgaactgtgtttcagaatggctgcaccatttttccattcccaccagcaatgtatgagtgatccagttcctagatcatttttgagttatactcacaaataaatgttctccaaagctttttattatttcttaaattcctgaagtagtgtttctaacagactaggggtctcaagcagtggatcacaagacacatttctattgggacagcattaaattgaattttttattgcacataacctgctctgtggtggtcagagctggatcactgattgtcaataatttgcatctggcgctttcctccaaccaatctatgacactccgttctttctgccattactaattttccttctagttcttcagtctttggacatatataattttatttcggcctcatggtatctatcagttaggacacttttggttgtaaataaccaaaaactcaactcatgctggcttgaacactggagaatttttgagcttacaaaactgagaagcctagggttagtggtgaggcttcaggttaagtttgatctagcagcttaagacatgagtaacctcccagttggttagttgtctgtttgtttgtttgtttgttttttgagatggagtctcactcagtcacacaggctggagtgcagtggcatgatctcggctcactgcaacctccgcctctagggttcaagcaactctcctgcctcagctccctgagtagctggggttacaggtgcacatcaccatgcctggctaatttttgtatttttagtagagacggggtttcaccatgttggccaggcctgtctcgaactcctaacctcaggtgatctgcctgcctcggccccaaagttctgaggttacaggcatgagccacggcacccagcctcagtttgtttgcttgtttgtttttaaatatttcaggtctcccttatgctgatgagaagcctgtttactcttgtaaatccaacatgggtctagcagcatcccaggcttcaggcttcaggttttatttttcttcagtagataaaaaaaaaaaacaaaaaaacagcatctttttcccaagatgttcaggaccgaagatcattctgattgaactggattaggtcacatgcccaccacaaacccaatcactgtggctaagaagacaaactgatgtaaatggctacagccagatcacataccccatcccagggatggggagggggctaaatcatcttcccaaaactatttagctccccaactgaaatgggggatctcaggaaagactggggagaggtgatagaagcttggaaattatattccatggacactttttgaaatcttttttttttttttttttttgagacagggtctctctctgccacccaggctggagtgcagtggcacaatctcggctcactgcaacctccccatccctggatcaggcagttctcctgcctcagtcccctgagtagctgggattacaggtacgtgccacctgaccagctaatttttttatttttagtagagacggggtttcaccatgttggccaggctttgctggttcttaaaacctctatgcctttgaataggaaaatatgcactggcaaaccataaaataattttctcatactcatgctgaggaagacatataaccatgaaaaacagtcactacttacccataattatcaatatttatataaacctaattagaattaattaaaagtggtctcaagtaggaagcgtgcctgacttactcaaaacatacctagggctgggtgcagtggctcacacttgtaatcccaacactttgggaggccaaggcaggaggatcgcttgaggccaagagtttggaccagcctgggcaacatactgagatcctgtctctacaaaaaatttaaacactagctggcatggtggtgcatgcctatagtctcagctacgtgggaggatcgcttgagcccaggaggttgaggctacagtgagctgtgatcataccactgcactccagcctgggaacagagcgagactgtatctcaaaaacaaacaaaaaacatatgtaggctattctgtatgggatagatcagtcatacagatgagagatggcagagtattgccaataataacccagggagcctgggatcaaatccccatttcacacctacaagctgtgtgagctcgtgtttcattcataacctctctgtgccaccgttctttcttctacaaaatgtcagccaataaccagtcaactacctaacagttgctggggagaaaaaaaaaaaaacagatatttacatgagaagagcttagaatggagccaggaagtgctgagtatatattagctatatatatatatatatacacacacaaaacagtagttgagaaaaacatgtctgtaattccaattttcaacagcaaactaacaatactttattaagtggtaaacaaataaatattatattcatataacaatatgaaagccagagatagctcgtctgagacacagatgaacaaaaaccagagagagggggccaggtgcagtggcccacacctgtaatcccagtgctttgagaggccaaggtgggatgacagctcgaggccaggaatttaagaccagcctgggcaacagagtgagacccccatctctacaaaaaaaaaaatagaagaattatctgggcatggtggtgggtgcctgcagctccagctgcttagggactacttaaagctgaagcaggaagatccttggagcccacaggattgaggttacagtgaactgtcatctcaccaccacactccaggctgggcccagagacagtgaagccctgtctctaaaaaagaagaaagaaaagaaaagacaaacaaacaaacaaacaaaaaaaaaaacagaagagaagggggagtattcagggtgtaaaccaaaattaaaattctaaggccccccgcaaccatctgaatggatcctgtcctctccgccaagggcattccaaagttaacctgaaaaaccagttcgggccataattgcaagggggagtgggacgtgcctcatcatagcctcctgctttttggaattactgatagaagagaactttaagtctgattttttttaaaattacaatctattttctctgaagcctgctatctggaggcttcatctgcacacacactcaatgtaagtaaaacaggatatctgaataagataggtggattgtgtcaatatcaatatgctggttgtggtattggactggaggtttgtaagatgttagttaccattaggagaaactgggtaaagggtgcacaagatctctgcattttcttcccttccttccttccttccttccttccttggtctccacaaccccttatggtaacccagaccttcctttctattgataataactcaaccaattgcccatcagaaactctttgaatccccctatgacttggaagcacaccctggcttccacttgtcctgcctttctggatggaactaatgtacatcttacgtgcattggttgatgccttatgtctccctaaagtgtataaaatcaagttgtgggccaggagcggtggctcacgcctgtaatcccagcactttgggaggctgaggcgggcggatcacctgaggtcaggagctcaacaccagcctggccaacatggcaaaaccccatctctactaaaaaggcaaaagttagctgggcatggtggtgcacgcctgtagtcccaactacttgggaggctgaggcagaagaatcacttgaacctgggaggttgcggttgcagtgagacaagttcgtgccagtgcactcaagcctgggcaatagagcgcgactccgtgtcaaaaaaaaaaaaaaaaagttgtggccggacaaccttgggcacatggttctcaggatctcctgggggctgtgtcacaggccattggtcactcatatttggctcaggataaatctcttcaagtgttttttagagtgtgactcttctcattcattgacaagggaaagaaagatacaaagacagggacagacaaacagaaatgtaatgagaaagcagagaaagatgaaggagacagcatgggaaagccagttgtgaacacccgatggcaggcatttaaatgatttggtagctctgccaagcctgtagcttcaaagaaaaggaaaaagtgtctcggttcattcctagagtacagaagacagatcagacagaggcaaagagagacaaacagatgtccagaaaacagacacaggcagttggctcaggatagagagttggaggccagccgtccctggcataggcccaccgtgggttaaagtcctcacaccccgactgggatcccagagggctggggccagcagtgacgttccgaaatcttgtccaggacggggaccggctgcaaaccctctcagccctgcacataaaagccagcatggtccgtcgaggcactgttgcccaggtggagactgctccggacgccccccaggggacagtggccggcagcacctgctgcagcacgaggcacagagggtgcactgcagggagaagtgagggcagaggccaaggcgaggagggggccggctcccgctctctctccctctgtgtgtgctgcgcctcccctgtgagcctaacccaaggcaggggactggacgcgtgggaccctctctttggcctccctgacgtccctcaggagcagagatgcgaccgagtgtgtgggccgcggtggccgcgggactgtgggtcgtgtgcacggtgggcgcggcgatccgccagcgctgcctgctctcgcactaccgctcgctggagccccggacgctggcggcggtcaaggcgctgaggaaccgctaagtgagtgaccgcccagcccttgcgccccccggtacactggccccgccgggttcccacacacccgtcgctgacccgaggggtcctgcgtcctagcgcccagcaggcgcctcttgtacgtcagagcccacagttcccaccacgagatccccgcagtccccgtcgtcagcgcgaacgcaggctcagggtcagtcacaaaaggagccctgcagggcggactcggctccaggtcgcgggcgcagggctatgccgggggagagcgggatgcaattcaaccctggttcacgccttcggggagctccctggttcagtacacgacaggcacgaccgtacgctgccagtacccatccacgtccaggaatcccagactgtgcagaggttaggggccctggcgagggggcccagtcgtatgcgataagcgccgcttgtcccgcaggcggaagaggcgctgagttggaggtcgcgcaactgctccgtccgccccaggagggatcctccgcggccatcggtgaggcccagaagcggacgggagaggcatggcctgggcgctgccccctctaacgccctctagtccccgcagtcctgcgctcggctccgccacgtggccaggagcatcgcggacgcccaggcagtgctcagcggcctgcaccgcctggagctgcttcccggcgccagccggatcctggagcccctggcagccgcggggagggacgtggcggcctgcgtgagtgacggccgcgccccgccgcccctcgcccccgccagcttctctgcatcctcaggcccatggcgagccccagcgctttgccaatctgtcctgcttagcggaaaaaccgatccagacccaggtcgggtcctctgggtgtcctcaaatccgggctcgggtctgcggctgggagggcctcgggcagatgcagagaggggctccgtccttcgccttttccatttgcctcgcgtcccacctccagctggcacggccaggctcctccaggaaggtccccggggcccagaggaggcgtcacaaaccgcggagagctgtgagtgcagcaggcagtacagggttagcctgcacggaggaccgagtgaggttgacacggacagcactgaggctgggagcggcgggattggagaggtcttctcgggagggaagagcctggcttagccccgctgccctccctccctggctccaggactcccctcggtgtcgcgaagccagcgtgatcttcaacctcctgcgcctgctcacgtgggagctccggctggctgcacactcagggccttgcctctgaccccgccccctccggcagcacggaaacctccacgccattggctgccgaaagaggtccctgtcgcccattgggccggccaggcgaggatctcagccagtgggtgctgaggcacgagaacttcttcgcagccttgggcctgacttggatccactgtctcagatataagaggagcgggtccttctacagggaagagaccacagttctccaggaagccacgatatttcctcggggtgcattgtacgaccctccaacggttgctatggcaggaaaaaacttgagctctggaaaccgtggctgaccccaggcaacagggaccagttcctccttgtgtggttaccaggacacccccaacaccaggtcctaaccccggatttgtagccccacagccagctttgagattctgtgaatccgtgactcttggatccggcatctaagggacaccaatccatgagggatttggtagtgaaaggcccaagggtccttaaccgactgtggttctttggattcccttacgtgtgtttgtatttgtgaagttcctgtgcatttgctattctgtctcccggtttaaatttattgccagttatcaaagagtgttttgatcgcattggttgttttccgtatgatgattgtgaggtgcaccttacagcaaaaaaagaggccgagccagggactcaggtggcctgaggttcagttctgaccctgccagttaattacagtggaattcagggcaaattacttttctgagcctctgtttcctcacctataggatgggttagcatacttgccttgtggaggagtagtgtccgttgagatcacgttttaaactctccaactgaggtcctagtatggtcttaatgagtggattctattaaataatcactcacataaatacacaaacaattgtgttattaattttttctccaaatctgtgcattagcaatctgcgttgctgaatgcacccctccttgccaaggtcacacggctagtgagggtcagaaccaggtttgaaccccagacccttcatctccaagacccatgctcttcaccactgcctgaacttccctaagaaagacggcacccacgtggtgtccttcaagtccttcgtcacacctcagttcttgagcagagcctcatattcctgagtccttccttgcctgggcaattaagaaatattggccttggctgggctcagaggctcatgcctgtaatcccagcactttgggaggacgaggaaggtggatcatgaggtcaggagttcaagactagcctggccagcatggtgaaaccctgtctctactaaaaatacagaaattagctgggcatggtggcacatgcctgtaatccaagctactcaagaggctgaggcaggagaatcacttgaacccaggaggcagaggttgcagtgagctgagatggtgcctctgcactccagcctgggcaacagagcgagactccatctctcttgctcactcactctctctcatgctctctctctctctctctctctctctctctctctatatatatatatatatatatatatacacacacatatatgcctctggccgggcgcggtggctcacgcctataatcccagaactttgggaggccgaagaaggcagatcacgaggtcaggagttcaagaccaacctggccaatatggcaaaaccccgtctctactaaaaatacaaaaattagttgggcgtggtggtgcatgcctatagtcctttctactcgggaggctgaagcagaagaatcccttgaaccaaggaggtggaggttgcagtgagtcgagatcacgctgctgcactccagcctgggctacagagcaagactccatctcaaaaaaaaaagaaaaaagaaagaaagaaagaaatcatggcctctgggcacagtggctcatgcctgcaaccccagcaatttgggaggccaagacagacagatcacttgacgtcaagagttcgagaccagcctggccaattggtgaactgtcatctctactaaaaccataaaaattagctgggaatggtggcacaaatctgtaatctcagctacttgggaggctaaggcaagagaatcgcttgaacccaggaggtggaggttgcagttagtcaagattttgcactgcactccagcctgggtgaccgaacaagaccctgtctcaaaatatatatatatatatatgccaggaggggtggctcaggcctgtaatctcagcactttaataggctgggtgaggaggatggcttgagcccaggagtttgaggctgcagtgagctgtgatcatgccattgcactccagtgacagagtgagaccctgtcttaaacaacaacaaaaccagagcaggtggaatcctcctgggaacataccttcctgtaggttacccctgagtctccatcagtttctctttccctccagctgctcatctggctcactagccctgccctgctctgggctttcccagcctggggctcccctggtggccggtgtcttacctgaggctgtgttttcacttttcctacatcagctgggactgcccttctgtcagggataaaagctgccccatggagctcaggcaggaattacatcccagacagagctcaaaactgacagaaagagtcaaagccaggacacagtctgagatccagaagaggggactgaaaagaacagagactccagacaagacccaaacagaccctgggtgacagcctcagagtgtttcttctgctgacaaagaccagagatcaggaatgaaactaggtgagtcccacatctctgtccgtgctcagctcctgcagcccctgccctcagtgggcagcctctccatcccctcagctccctttctctctgtgacacagacatgactggggactgcacgccagtgctggtgctgatggccgcagtgctgaccgtgactggagcagttcctgtcgccaggctccacggggctctcccggatgcaaggggctgccacatagcccagttcaagtccctgtctccacaggagctgcaggcctttaagagggccaaagatgccttagtgagtctccccctgccctcctgccatggactagcctccacccccactccaagcgtcaccatgctttcccactcccagcttccttcactgggctagcctccaccctccctgcagtgggctatctcatgctcctactgtagggactgactcatgttttcctgtagaagagggtcctctaccatcctcccagcagttaacctcccctatcctgttgtcagccatcctccaatcccaccaggatggtctaacctccacccctcctgctggggctaacctgtgcctttgctgtctaggaagagtcgcttctgctgaaggactgcaggtgccactcccgcctcttccccaggacctgggacctgaggcagctgcaggtgagagggggagtcaggcccacccctgctctcccagccccactcacctggctctgtagtggccccttcaccgtctctttctcccttgtctctctctcttctcctcacacctgctctcccttccctccgctcccacctgaccacactggctgtgccctctcccctgtgcctgtcaccttcacttgttcctctctatcctgctccccaacctgttcccctcacctcccccctcacctgctctttctcacctctcctcaggtgagggagcgccccatggctttggaggctgagctggccctgacgctgaaggttctggaggccaccgctgacactgacccagccctggtggacgtcttggaccagccccttcacaccctgcaccatatcctctcccagttccgggcctgtgtgagtcgttggggcctgggcacccaggtctgtgagctctgagcagcgtccttccccttgccaaggccccggctcacacaccgccctcctctgcccacagatccagcctcagcccacggcagggcccaggacccggggccgcctccaccattggctgtaccggctccaggaggccccaaaaaaggtgagtgacccgggaagagagggactgaggtctggggagccactgggagcccagaacccagacagcccctgacccatcccctcctccctacaggagtcccctggctgcctcgaggcctctgtcaccttcaacctcttccgcctcctcacgcgagacctgaattgtgttgccagtggggacctgtgtgtctgaccctcccaccagtcatgcaacctgagattttatttataaattagccacttgtcttaatttattgccacccagtcgctatttatgtatttgtgtgtgtaaatccaactcacctccaggaaaatgtttatttttctactttttataacccttgttgaaataaacaaaggaaaagacactcatgacgttggactgtgtgtctgttggtgtgtatttcctttgtgttgctgccataacaacgctaaaagtagcatcttccaaagacacacttgatgagctgggagtctgcaggtcagaggctcgctggccctggctggtttctctcctgtgggactcacaggctagaatccaagcattgctgctgggctcttactgggagctctgaagagaaactctttccagggtcagtcacattgttggcagatcactgttccttgctgctgtaggactaaggttcctgccccctcctggctatgggtccatcctgagctgactctgctgaagggttctccactcctctcactaagctaacctctaccctccctgcagtgggctatctcatgctcctactataggggctgattcatgtcctcctgcagtggagggtcctgtaacatcctcccgggagttaacctccactatcctgttgtcagccatcctctaatctcactggagtggtctaacctccaccccttctactgggggctaacctgtgcccttgctctctaggaagagtcgctcctggggatggatggcaggtgccgctcccgcttcttccccaggacctgagatctgaggcataatacataacgtattctatccctcatgacagtggaagacagaataatttcactgccctgaaaattcactgtccttccccattcatgcttatctggctgtctgtggtccctactaataggcccttccaactcagagccaggaacagtgcttcaaacctttctcatgcttggaacctctctgacctctcctgccatgttgctcttgtacttccagctagagaaagtcttccacgtttcagggctcaggtggttagtttggcatccagggtgatctccccattgtcaatccacatgccataatcgcatctgcaaagctcctttgccgagtaacataagatatgcacagggtccagggatgcggtgctgggtgactttggggtggcatcttcggcctcctacagtgtgtgtatgattgtgcttctgattgtgcgtcattgtagttatgggattgtgtgtgtgcctggtctacctgagagtgtatgagggatcatttagaatgcattgtgctataagtaaagtaacagaagctagaaatgccttggtaataagaactttcatcagcatccatggtgagacatctagaacagcaggttcattgagggctgtgctatccactggagtccgcgggccacatgtcactatcgagcacctggaatataggtggtgcaacctcattttttcagtgagtgtaaaacataccccagaatttgaagatttactgtgggaaaaaaataatgtaaaacagctcgattataatttacatattcattagatgttgaaatgatagcactttggatgtattgggtgaaatgaagcatctttaaaattaatttagagcctggatgtgattgctcaagcctgtaatcacagcactttgggtggctgagttgggaggatcacttgagcccagactagcctgggcaacatagcaagatcctgtctctataaaaaattagagaattggctgggtgtggtggcacaagcccataatcccagctactggcggaagctgagatgggaggactgcttgaggtcaggagttcacgaccagcctgagcaacagcaagatcctgtctcttgcgtgatcacatctcactgtagcctcaaactcctgggctcaagtgattctctctcctcggcaccatcctccaccctctccagcccctccccgaactgggattacaggcttgagtcaccgggtccagcccattctctttccaagaagcccctgaattgtataagcaagcatgaggtctcactaaccctggatcggcccccacaaatgagggggacaacttggatcagggacccctgctgagtagagttggctgagctgctggaacaaagagtcccccaaatacagtgatcatgaattacaaaccacagagtgtcattctccaccagctcctcctcccaaggtgagcgctccccctggcaggatggccccactcagtcatccaggggccctagttcctggcagttctgtgctccacagtccccgggacagggctccctcatcatcttcacccaccggacctcacggcagccttgaaaagcctacggacccttctcagaaggaaagaacacgtgcaggacaaaggaatccaactctgattgtaatacagtgatcaaaatattttttcacactgtgacatagcaattcatgtgcttcttcatgaatgcattaagtaaaaaatcacctgtggcagctttaataaccactgtgacttagaagcagagatgagcataaatgatatttcaaggtgcctgctggaagataacgtgataggaaatgcctgtgatttcttttggtaacaaagtcacaagttctgctaacactgttgtggtgtgttgctgcatttgtaatggattcgtgctagatgcaagactggtccccagagatgttcctgattcttggacctgggaatatgttatgttccatggcacgagggactctgcagatgtgagtaagttaagggtttgggatgggggcgttatcctgggttgtccacctggacccaatgtcatcacgaaagtccttctaagaaggaggccggggtcagcatcattagcggaagatgtaaccacagaagcaggatgttggagtgatgtcagcaagggaaccggggtcaagggatgctggacacccccagaggctgagaaaggagagagatctcccctgctgcttccagaaggaacccgctctgctgacgcctgaagcctcacgagtgggatagaaaacaccagtagaagaaccagctggccacctgagaatcttgagaaattacaaatcactggcaattgttggggggagcggctgttgttttgttctttttggggtttcttttgcttttttgaaacaaggtctcacttctgtgtgcagtttgggccaaagtagctccaggacaggtgtacgggacaaagagtgggtcatcagttcaataaatagccagcccagccaggtgtggtggttcaagcctgtaatcccagcactttgggaggccaaggcaggcagatcgcttgaggtcaggagttcaagaccagcctggccaacatggtgaaaccctgtatctactaaaaatacaaaaattagctgggcatggtggcaagagcctgtaatcccagctactcgggaggctgaggcaggagaatcacttgaacctgggaagcagaggttgtagtgagccgagatagtgccactgcactccagcctgggtgatacagagagactccatctaaaataaaataataaaaataaataaataaaacttgtacgaggccggggcagtggctcacgcctgtaatctcagctatttccaaggctgaggtgggaggatcacttgaacccaggagttctagaccagcctgggcaacatagtgagactctgtctctaccaaaaacaaaaattagccaggggtggtggtgcacgcctatagtcccagctgctcaagaggccgaggcaagaggatcacttgagtccaggagtttcaggccacagtgagctatgatcctgcctctgactccagcctgagcaacagaatgaaatcctgactctaaaacaaacaaaatactaatgtatgctacaacataggtgaaccttgaaaactctgtgcttgacctctgatttgggggaagaaaaaaagagcaagaaaggccaggcgtggtgactcacgtctgtaatcccagcactttggaaggccgaagtgggtggatcacctgaggtcaggagttcgagaccagcctagacaacatggtgaaatcccatcttactaaaaatacaaaaattagccagatgtggtgactcatgcctgtaatcccagctactcaggaggctgaggcaggagaatcactggaacccaggtggcggaggctgcagtgaactgagattgcaccagtgcactccagtctgggtgacagggcaagactccatctcaaaaaaaaaaaaaaaaaaaagcaatgaaataagtaaataaataaaagaaaaagaaaacactatcctgagtgaaagaagccaggcacaaaagaccacacattatatgattcaatttatatgaactattcagaataggtaaatttgtagaagaaattcacagaaagctggccaggcacagtggttcacacctataatcccagcactttgggaggccgagaccgtcagatcatttgaggccagaagttcaagaccagcctagccaacatggcgaaaccccatctctactaaaaatacaaaaactagctggacgtggtggcaggtgcctgtaatcccaaatgctcgggaggctgaggcaggagaatctcttgaacctgggaggcggaggctgcagtgagccaagatcacgccactaaactccagcctgggcaacagagcaaggctccatctcaaataataataataatataaagaaaatgttcagctgaattaaatttaaagaagttcagttgagtaatgaatcatttgtgaatcgagcagcccccagagtcacagaagattcagactccagcacggtctcgtgatcagaacaaattcatagacagaaaaagcgaagtgacgtatggaagttggaagttttgtacagaaacagctggataggctgcaggctggcgtttgccttatttgaaaacagttcgaacacttagcaatctatgagtggttgaagtatggccgctgggattggccaaccctcagctattgttatgggcacatactcctaaattaggttttcaatcttgtctgcctattaagctaggttacagttcatccacaaggactcaaatatagaagtacagagtctccttctcaggccatatttagtttgctttaacagcttcataatctgcctctctgccctcgccgatcatctgtgaacttcccaatgcccttgactgctcaaattagccagtgtggactctatgctaagagccctgacctatgcagccaggaatgggctcttaattcatgaaacagcagtgcaggttaagcacagtggctcacgcctgcagtcccagcactttgggaggccacggcaggaggatcacttgagcccaggagtttgagagcagcctgggcaacatactgagacctcatttctacaaaaaatataaataaaacttttttaaaaaatagccaggcatggtggcacccacctgtcatcctagctactcaggaggctgaagcgtggaggctcgcttgagcccaggagataaggctgcagtgagccatgatcatgccactacactccagccttggcaacagaacaagaccctgtctcagaaaaagaaagaaaggaacagcaatgaggccagtgtgatggagctgcgagggggagggtccagacctccaagagctttgtaagggaaggcaggggttggatatttttttctaagcagaatgggagccacaagatggttttgaatagagcggggatgtaatctctgactgtaggtgggaaagagggtgtgggagtgaggggtgaccaggaggaagctgctgtgatcatccaggcaggaggtgacagtagacaggtagatgagatgtatggggagggtgagaagtgcgtgaatttggaaacgctttgaaaatacagccagtggaacttactgatgaattgaaaatgatgtggtattgtgtatgtgtgtgtgcacatgtgcatgcaggcgtgagagagagagaaggatggcctgatggttacaatgaagcctcaatttcatcagtggaaaaggagaacaatactcactgccgaggcttgttgtggggaatctatataattgtgggtgtaaagcacttagcacatttcatgaaatatagtcactgtcatcattattcattacgagatgtgttctaaggtaagcaggtctgtgcaaacctacccccaaaggccaagggagaaagagcctgacaaatccagtttctttttttttcttcttcttcttcttttttgagacagaatctcctgttgcccaggctggagtgcagaggtgcgatctcagctcactctgcctcctgggttcaagcaattctcctgcctcagcctcccgagtagctaggattacaggcgcccaccatgacgcccggctaatttttgtatttttagtagagatagggttttaccatgttggccaatctggtctcaaactcctgatctcaggttatccgcccaccttggcttccctgagtgccaggattagaggcgtcagccaccacgcccggccgacaaatccaatttcttagaaggaaacgtttaagaggaattcacaaaccgaagccatgtctcaggaggccctaggaagacagaggggatcccccacacagttatcccacaaatgtagggcttatacactataggaaatttgcctcaaggcaggatttatggtaagtatgtgtttatgataacataaaggttattttgacctaagggcaggatttttggtaagtacatgaaaatagaaatcttagaggcattcccagaactggagttaatcagaagtcaacatgggcctgaatctcagcactttgagaggccgagaatggaggatcgcttgaccccacaagtacaagaccagtctgggcaacatagtgagaccccgtctctacaaaaaaatttaaaaattagctgggtgtggtggtgaaggcctgtagtcccagctactcaggaggctgaggtgggaggattgctggaccctgggaggtcaagatgcagtgagccatgatcgtgccactgcactgcaacctgggcaacagagcaagactctgtcgcaaaacaaacaaataaaaaagaagtcaagatggcagattagcatccaagatggagttactttaatctcccctgggtgtgtttgtcattgttgttgttgtttaagacacagtcttgctctgttgtccaggctggagtgcagtggcatgatctcagctcactgcaacctccacctcctgggttcaagcaatctcctacctcagcctcccgagtagctgggattacaggcacgtgccaccatgcccagttaatgtttgtatttttggtaaagacagggtttcaccacgttggccaggctggtctcgaactcctgggctcaaatgatccacctgcctcggcctctcaaagtgctaggattgcagcacccagcccactgggtgtgtttgagacaagtcaaccaaacccatcgtgtttcttctggcagctcccgcaaaactgtacatgtgccccctaagattccaagaaagacctccaccatgccccaattgcttcaaaaacatctgcccccaactcgtttgtgctttcaccactgctaggaaataggggtgactcagggcgatttcctctcctttcaccactctatgggttctgagggttttccgtcagggatctctttctagaagaattccaagctctctgctctagcctcctttctgtttctctttcgaattcagtctgtcctctgtcatctcctgaccactgcgtatctgagcttccccagccctgccctggcggcacattccaatttcaggaggtgtgtttgcttttctttcttcagctgggattagccaatccagtggttcatggcccttgcttgcttcataatcacctagggaactcaaaagatgtctggcctgcaatcccagagatgtgattggttttaatcattacattctatcagtgattcctaaactttaaagcgcatcggaatcagctagagtcttgctaaaccgtagaaccaacctcattggcaccaccttggcagagtgttagaaatactgaatctcaggccctagcccagacccactaaatcagaaatgtgcaggttaggctggcacagtggctcacacctgtaatcccagaactttgggaggtggggtcagggagattgcttaagcccaggagtttgagaccaacctgggcaacacggtaaagccccatctcaataaataaataaataaaccatgtgtggtcgagtgcacctgtgatcctagttacttgggaggctgaggcaggaggatcacctgagcccagggaggtctagtctgcagcaagcagtgattgtgctactgcactccaccctgggtgacatagtgaaaaccagtctcaaaaaaaaaaaaaaaaaaaaaacagaaaaaagaaaagaagtgtgcactttaacaatatttccaggtaactctacacatgtgaaagttgaagaagcactgggctcaacccctgactgctgtgcagctgggggtagaccaggtggagtgggcctgccagcttgccttgcagaacctcagatcccacagccagatcccaaccccactgtaacctccatttcctacacagccttctctgaacgctcctcccacctctgcctatggagcatcataataataataaataatattttaataacaaaatggcaaaagtttatttggtgcatctcctatgcaaggaattaaatgaattaagttaattcatttaatccttactaccaccttaggatgtaggtcttacaattagtcccactttacagatgaggacccagagcatcaagatgcatccggccaggcgcggtggctcacgcctgtaatcccagcactttgggaggccatggcgggcagatcacaagatcaggagtttgagaccagcctggccaatatggtgaaaccccgtctctactaaaaatacaaaaattagccaggcatggtggtgtgcatctgtagtcccagctactcggaagactgaggcagaagaattgcttaaacctgggaggtggaggttgcagtgagccgagatggtgccactgcactccagcctgggtgacagagtgaggctctatctcaaaaaaaaaaaaaaaaaaaagaagaagaagatgcatccagccgggctcggtggctcacaggcaacatagccagaccctgtctctacaaaggtaataatactaataataataatcataggcaggcacacctgtagtcccaactacttgagtggctgaggcaggagaatcacttgagcccaggaaatggaggctgcagtgagctgtcatcacaccactgcactccagcctgtgcaatagagcaagaccctatctcagaaaaataaataaaatattatagacttacaagaagttgcaaaaataccacagaagcgtttcccatatccctcacccagcttttcctaatagtaacatcttgcataactatagtaattctcaaaactaggaacctgacattgtcacaatactattcactcaactacagactttaccgggatttcaccagtttttgcatgcactcatttctttctgcatgtctttgtgtataattcagtgacagtttatcacaggtataaatcccataatcaaaatacagaattgcttccttactacaaagaaatgtacaagtcacacctttacagtcacatcctccctctccttctcttacccttgacaaccactaatctgttctccagctttgtaattttgtcatttcaaggatgttatataaatggaatcacatagcatgtcacttttttttttttttttgagacagagtcttgctctgttgcccaggctggagtgccgtggtgcaatctcggctcactgcaacctccacctcctgggttcaagcgattctcctccctcagcctctcgagtagctggggttacaggcacgtgccaccacacccggctaattttttgtatttttagaagagatggggtttcaccatgttggccaggctggtctcgaactactgacctcgtgatctgcctgcctaggcctcccaaagtgttgggattacaggtgtgagccaccacgcccggccagaatgtcactttttgagaccgacttttttccccactcagtaaaacatgcttaaaatccatccaggttgtgtgtatcaatagttgaatcctattaattgctgaaagtaattgtggtttttgcattgttgaaatttgtcatttgatattggaatacattcttaaataaatgtggttatgttatacatcattttaatgtccatttcttgctttatgtttttttgctcatgacattacttgctgttgattttatgtttactttagactatggaaattatattaggcagaaagcaaattcaggcaattttcttatttgggttcaaaacgggttgttaagcagcggagacaaatcgcaatatcaacaacacatttggcacgggaactgctaatgaacgtacagtgcagtggtggttcaagaacttttgaaaaggagaagttttgccttgaagatgaggagcatagtggccgccgtaggaaattgacaacaaccaactgagaacagtcatcgaagctgattctcttacaactacacaagaagttgccgaagaactcaacgtcgaccatggaccattctatggttgttcggcatttgaagcaaatcggaaaggtgaaaaagctccataatggccaggcgcagtggctcacacctgtaatcccagaactttgggaggccgaggcaggcggatcacctgaggtcaggagtccgagaccagcctagccaacacggcaaaaccctgtctctactaaaaatacaaaaattagctgggtgtggtggtgggtgcctgtaatcccagctactcaggaggccgaggcaggagaattgcttgaacctaggaggcgtaggttgcagtgaaccgagatcgcgccgctgcactccagcctgggagacagggcaagactctgtcacaaaaagaaaaaaaaaaaaaaactcggtaagtaggtgtctcatgagctgagcgaaaattttaaaaatcgtcattttgaagtgtcatctcttattctatgcaacagcaacgaaccatttcttaatcagattgtgacgtgaaatgaaaagtggattttatacaacaaccggcaacgacccgctcagtggctggactgagaagaagttccaaagcccttcccaaagccaaacttgcaccaaagaaaggtcatggtcactgtttggtggtctgctgcccgtctgatccactacagcgttcggaatcctgacgaaaccattacatctgagaagtagcctcagcaaatccatgaaatgcaccaaaaactgcaatgcctgaagctggcatcggtcaacagaacggacccagttctccacgacaacgcctgactgcatgtcacacaaccaatgcttcaaaagttgaatgattgggctatgaagttttgcctcatccaccacattcacttgacctctcgccaaccaactaccacttcttcaagcatctcgacaactttttgcagaaaaaaatgcttccacaatcagtaggatgcagaaaatgtttcccaagaactcgtcgaatcccaaagcacaatttttacggtacaggaataaacaaacttatttctcattggcaaaaatgtgttgattgtaatgtatcatattctgacttataataaagatgggtttgagcctagttataatagtttttaaaattcactgtccaaaactgcaattacttttgtaccaacctaataatattctcttgcatggacgtgccacactaaccattcacctgttggaggacatatgagttgtttccagtttgggactatcacaaataaagctgctatgaatatttgtatcagctttttgtttggacatacatattgatgtctctaggataaatgagcaggagtgtggttgctgagtcatgtggtaagcacacacttaaatttttaagaaagtgccactgttttccagaatggctgtatcattttacattttcaccagtggtgtgtggaagactgggtttcttcacgtcctcagcagcatttggtcctattggtattactgttactcattctaataggggtgtactggtatctcatcttggttttaattcacatttctctaatggctagtgatattgacatattttcatgtgtttgtttactatctgtgtatcctctttgactgtctgttcatgtcttttgcccatttctattggattttttcttgtttttatggatgagttttgagaataatatatatttttttctagctactattccttgttgaatacatgatttgtaaatattgtcttccagccagtgtcttgttttctcatcctttaacagggccttttgcagaacaaaagttattaattttaataaagtccaattgatcctttttttgttttagagacaggatcttgataaagcaatcctaccacctcaagtttccaagtagctaggactacaggcatgtgccaccatgcccagctaatttttttatttttgtagaaacagtctcactggctgggcatggtggctcacgcctgtaatcccagaactttgggaggcagaggcaggtagatcatgaggtcagaagatcaagaccatcctggccaacatggtgaaaccccgtctctaataaaacacaaaaaattagctgggtgtggtggcacacgcctgtagttccagctactcggaaagctgaggcaggggacttgcctgaacctgggaggcagaggttgcggtgagccaagattgtaccactgcactccagcctgatgacagagtgagactccatctcaaaaaaaagaaacagtctcactatgttgcccatgctcgtcttgaactcctggactcaagcaatcctcccaccttgtccttccaaagcgctgggattacaggcatgagctgcctcacctagcccctttttgttttttaaagaatcatgctggttgggagcggtggttcatgcctgtaattccagcaatttgggaggctgaggtgggcagatcacctgactcaggagtttgagaccagcctggccaacatgatgaaaccctgcctctgctaaaaatacaaaaattagctgggtgtggtggtatgtggctgtaatcccagctgctcagaaggctgaggcacaagagaatcgcttgaacccgggaggttgcagtgagccgagatggcgccactgcactctagcctgggtgacagagtgaaactccatctcaaaaaaacaaaacaaaaacaaaacaaaaaaaaaaatcatgcttttggtatcaagtctaggaactctttgcctaaccctaagttataaagattttcttctatgttctgtttttaaagtttacagttttacattttacattaagatctatgatatatcctgagttaattttcttttttctttcttttttattttttttgagcagattgtcactctgttgcccaggttggaatgaagtggcgtgatcttggctcactgcaacctcggcctcccagattcaagtgattctcgtgcttcagcctcccaagtaactgggactatagacctctgccaccatgccaggataatttttgtgtttttattacagatggggttttaccatgtttgccaggctggtctcaaactcctgacctcaggtgatccacctgccttggcctcccaaagtactgggattacaggcatgagccactatgccaggtcctgagttaatttttatataaggggtgaggtttaggctgacattcgtacttttcactcttgatgtctcattgcccatttgttgaaaagactatcttttctatattgagttcttttgtaccttgatcaaaattcatttgggtatacttatgtggttctgtttctgggttctcttctgtttcattgacctatgtgtctgtgcttccactaatatcatactgtcttgattatcatggtcatataataatctcaaaaccagcaagtgtgactcctcctaccttcttccttttaaatattgtttcagctattctagttcctttgcctttctatatacattttaagataagcttgtctatacagaccaaaaaaaacttggaatttttatgggaactgcattgaattatagattactttgaagagaattgacatctttactatgttgagcattccaatccatgaacatggtatatctgtcccttaatttagataggttttgatgtctttcatccgggttttacagttttcagcatacaaatcctattcatgttttgttggatttatacctaagtatttttcagtaattgtaagtggaattgtatttttaattttagtttccaaatatttattgctggtataaataaatataattgattttctgtgttcatgttgtatcttgtggctttgatcaactcacttattagttctaggagttcttgtagtttcctggggctttatacataatcatgccatctacaaataaggagagttttatttcttcccttccaatctctgtgtattttattttatttttgccttattgcactgcctaggacttctgacactatgttaaataagagtgatgagacatcacacccattaggatggctacaacaaaaacagaaaataacaaatgctgacaaggacatggagaaattggaacccttgtacactgttggtgagatgtaaaatgatacagccattatggaaaacagtatggcagttccccaaaaaattaaaaataggattaccatatgatccagcaattccacttctgtgtatatacccaaaagaattgaaagcagggactcaaagaggtatttgtacacccatgttcatagcagcattatttgcaataactaaaaggtgaaaacattccaagtgtctattgactgataaatgaataagacaaatgtgatatatacatgcaacagaacattattcagccttaaaaaaagaaagaaagaattctgacccatgctacaatatgaatgaaccttaaggccgttatgctaagtgaaataagccagtcacaaaaggacaaatatatgattctgcctatatgaggcatatagagtagtcaaattcatagaaacagtaatatagcagttaccaggggcttggaggagaggggaatgggagttattgtttgataagtaaagacttccagttttgcaagatgaaaagagttctggagatagatggtactgatggtagcacaacaatgtaatgtatttaatgccactgaattgtatacttaaaaatggttatgataggccaggcacagtggctaatgcctgtaatcccagcactttgggaggccaaggtgggcaaatcatctgaggtcaggagttcaaaaccagcttgagcaatatgatgaaaccccgtctctactaaaaatacaaaaatttgccaggcatggtggcacgcacctgtaatcccagctactcaggaggctgagacaggagaatcgcttgaacccagaaggcagaggttgcagtgagctgagatcgcgccattgcactccagcctgggcaacaagagcaaaactctgtctcaaaaaaaaaatggttacgatagtaaattttatattatgtgtatttcatcccaatgaaaataatgaaataatgaggggtgagaatgagtatccttgccatgcttgtgatttttaggaggaaaagcaacaagtatttcaccattttgaggctagctgaaggtttttcataaattttgttatcaggctgagaaagtttccttcaatttctagttttctgaaagttttttatatcaggaatggatgttagattttgtcagatgctttttatgcatgatttttcttttttagcctgttaatatgatgaatcccattgagaaattgcaaaatatttggctaaccttgcattcctggaataaatcccacatagtcatgaagtataatttttctttaatgtgaaacatctttatttactttggaccaccactcttccagtgagattaacttttccacctttaactgcagtaaaagatatattaagttggtgcaaaagtaattgcagtttttgccattatttttaacgacaaaaaccacaattacttttgcatcaacctaatataacgtaaaatttgccattttaaccacgtttaagtgtacaatttagtggtattaattacattcacaatggtgtgcagccatcaccactatgtgttttcaaatttttttcaacaccccaaacagaaaacctgtatgcataaagcaaataacatcccttcctcactcagccctaagtaatttctaatttcctttctgcctctatgaatttccctattctcgatatttcccataagtagaatcataaaatatttgtcttttttgtgtctggcttacttcacttagccataatggtttcaaggataatcgatatagcagcatgtattagaatttcattcttttttatacatgaataatatttcattgcatgtacatatcatattttgtttattcactcatctgttcatgaacacatgggttgtttccatctttgtgaataacagtgttgtgaatataggtctataagtgtctgcatgagtccttgttcagttcttttttttgacatggagtctcactctgttgctgaggctggagtgcagtggcgcaatcttgattcactgcaacttctgcctcccaggttcaagccattctcctgcctcagcctgccgagtagctgggattacaggcatgcaccaccacgccctgctaatttttgtatttttagtagagatggggtttctccgtgttggccagcctggtctcgaacttctgacctcaaatgatctgcccaccttggcctcccgaagtccttgttcaattcatatggcaacatatttatttttacatattttttattgctgtataagatttgctttttttgtatgtacattcataaaaaatattggtctaaactgggcactgtggctcatgcctgtaatcctagcactttaggaggccaaggcgggaggatcgcttgagcccaggtgttcaagagtagcctgggcaacatggcgaaattttgtctctacaaaaaaatccagaaattagccaggcatggtggtgggcacctgtagtcccagctacccaggaggctgaggtgggaggatcacctgagcccaggaggttgaggctgcagcaagctgtgatcatgccactgcacccagcctgggtaaaagagtgaaaccttgtctcaaaaaaaaaaaaaaagataagaaaagaaaaggaaaatactggtctatagcttctctttttctttatttgttttcattctgcctttgtctggttttggaatcaggataatgctgactttataaaatgaaatgaaaagtattgcttcctcttctgttttctggaagcgatactaaagaattggtatcaattcttctttaaatgtttgctagatttctacagtgaaaacatctggacacaaagatttccttcttgggagccttttaattagagatcaagttttttaaatagttataagactactcataatatctatttcatcttaggtgagctttggccaagcgatcctcccgccttggcctcctaaagtgctaggattacagcactttgcggtctttgagcaatttgtccatattgtctaagttgagtttatatgcatagactcattcacagtattcccttattattcttttaacgtccatgaggtctgtagtgatagtggtcatttgtgtcttctctcttttctcttcttctgtcttgctaaaagtttatcaattttattcatcttttcaaagaaccagcttttgattttattgtctttattgcttttctgttttctatgtaattgatttctccacctctttatgatttctttccttctgcttgatttgagtttacttagctttttctagtttcttgagggaatgccttgtttagtaatttgagacttttccttcatttttttgtttttttgagacagagtctcgctctgtcatccaggctagagtgcagtggtgccatctcggctcactgcaacctctgccttccaggttcaagcgatttttgtgcctcagcctcccaagtagctggggttacaagtgtgcaccaccacacctggctaatttttgtatttttagtagagacaaggtttcaccatgttggccaggctggtcttgaacttccatcaaatgattcacccacctcagcctcccaaagtgctgggattacaggcttgagccaccacatctggccatttcttcatttttaatataagcattaagtgctataaacttctctctaagactgctttagttgtatcccacaagttttgggggaggtttcttcctgttttttttttttgagacagggtctcattgtgtcacccaggctggagtgcagtggtgctatcactgctcactgcagcctcaacctcctgggctcaagtgatcctccctcctcagcctcccaagtagctggaactacaggtgcacaccaccacacccagctaatttttaaattttttgtaggaccgtgtctccctatgttgcccaggctggtcttgaactcctgggctcaaatgatcctcctacttcagcctcccaaattgttgagattacaggcatgagccactatgtccaaccacgagtttttatatgttgtatttttgtcctcattcattttggctattttttttttttttttttttgagatgaagtctcactctatcgcccaggctggagtgcagtggcacaatcttgactcactgcaaccttcacttcccaggttcgagcaattctccctgcctctggctcccaagtagctgggattacagattcctgccaccacacctggctaattttttgtacttttagtagagacagggtttcgccatgttggccagggtggtctggaacccctgacctcaggtgatcagccctcctcagtctcccaaagtgctgcgattacaggcatgagccaccctgcccagcctaacttttgtatttttgatagaggtgaggtttcaccatgttagccaggctggtctcaaactcctgacctcaagtgagccacccacctcagcctcccaaatgctgagattaaagtgtgagccatcacgcctggcctccatccatttacttttaacctacctatgtcattatatttgaaatgagtttcctgtagacagcatacagttttttaaaatatattctgccaatctctgtatataaaccatttgcatttaatgtaattacagatatattagaacttaagtctcccatcttatttttcttctgttccttctgttttttattcttgtttccttttcattgccctcctgtggattactaagcttttttttagtgtttcatttagctttatctatagtttttttttttttagtatatctctttatatagttttttagtggttgctctggaattacagtatatatataacatcacaatgcaatagtattaatattttatctcttcaaatggaatgtaggaaacatcacaatttaggtccctttatcctccctgatttataaatatataggtatctttattttgtggtgggggaacaaagtctcgctccatcaccccatttggagtgcagtcacagctcaccgcagcctcatctccctgtctcaggtggtcctcccacctcagcctcccaagcagctgggaccatgggaccacaagcacctgccaccacgcctggctaatttttgtatttttggtagagatagggtttcgccatgttgcctaggctggtctcaaattcctgagcttaaacaatacacccaccttggctcccccaagtgctgaaatcataggcatgagccaccatgcccgtccccactttctttctgttcatccagaacatcagtgatgtgagtgttaaaacttaatgtactaaaggtccctggagctcttttcttttctctttttttagagacagggtctcacattgtcccccaggctggagtgcagtggtgcgatattggcttgctttaacctccacctccctggagttcttttcatttttaaaaatctactttctatcctttgttcatacttcaatctatttgctacttactctctgttgttcagaatgagtaatttctattgacctatcttcaagttttctgattctttcttctgccatctccattctgctatttggccctttcagtgagttttacttcagttcttgtatttttcagttcttatatttctctgttctaaaatttccactcaattctttataccttctatttctttgatgaaactttctattaaaaatttttgtgtcagccaggtgcagaggctcactcctgtaatcccagcactttgggaggctgaagtgagtggatcacgaggtcaggagatcgagaccatcttggctaacacggtgaaaccccgtctctactactaaaaatacaaaaaattagccaggcgtggtggcaggtgcctgtagtcccagctactcaggaggctgaggcaggagaatggcatgaacacgggaggtggagcttgcagccactgcactccagcctgggcgacagagcaagactctgtctcaaaaaaaaaaaaaaattgtgtcaaaagtattcatgattgtttgttgaagcatttttatgacaattactttaaaattattgtcagagagccaggcatggtggcttacacctgtaatcccagctactcggaaagccaaagagggacgattatttgaggccaggagtttgaggccagcctgagcaacaaagtgagatttcacccatatcttaaaaagcaaataaataaaaattttttaaatatttttgtccaataatttcaatatttgtatcattttagtgttggcatctattgattggcttttcccattccacttgagattttcctagttcttgagatgatgagtataacaagttattttctcttgtatcctggacttttgagacattacattatgaaatgctggtttcttttttaatcttgtcattgctgaggcaataatcagagctctgttcacacatttctggtgctagtcaccttacacagtgaacaaatcacaagttttgggtaatttgttacatagtaattgtaacgagacacacacacacacacacacacacacaaacaagcctatttgtacataaaagaagaaattgtctacgtgtgcaggtataattcttttgctccttgggccccaggacagcagtagagtaaaaatggctgtgtggggtccttggtggggtgggaattagaggtgatagggcccccaccatagtttaggtgacctgaaagctgggctgtatatctgttttagtgcatttgtgttgctataaaggaatacctgaggctgggcaatttataatgaaaagaggcttatttggctcacagttccgcaggttgtacaagacgcatggcactggcatctgttcctggtgagggcatcgggctgcttccactcaggatggaaggcaaaggggagctgcatgtgtggagaccatgtggcaagagaggaagcaagagagatgagaggtgccaggctctttttaacaagcagctcttgagaaacctaacagagtgaggactcacacattacctcaaggatggcaccaaaccattcacaatggatctgcccccaggacccaaacacctccgactaagctccacctcccaacattgccatactggggattaaactttttttttttttttttttgaaacagagtctcactctgtcacccaggctgagtgcatgatctcagctcactgcaacctccacttcccgggttcaagcgattctcgtgcctcagcctcccgagtagcgccaccacacctggctaattttttgtatttttagtagagacagggtttcaccctgttggccaggctggtcttggactcctgacctcagatgatctgcctgcctcggcctcccaaactgctgggattacaggtgtgagccaccacgcccagcccttatttttttttttttttaatttgtagagatgaggtcttgctatgttgcccaggctgggctcaaactcctgggctcaagcaatcctcccttctcagcctctcaaagtgctgggattataggcatgaataatcgtgccaggccaaagacaagttttaacagtcagctctctggccacaaattatttatattccttccacatgcaaaatagactcatgtctttcctcaacctcaaaaatctcatctactatggcaggctcagatgcaagccccaggatctcatcatctaaatcagatccaagtgttggggaggctacagtattgccagcatatagaccctcgagcacttctggagagagggatacaggtgcaactatttgggagagcaaaggatgaatatgtagagctgtgctgcccatcatgatagccactagccacatacagtaattaaatttaaataaaatgaaataaattgaaaattcagttcctgcattgcacttgccaaattttaaatacctaacagccacattggaccgtaaagatgcacaatatttctgtcattgcagaaagttctaatgaacagcactgattagaccatataagcacaggtatgccctgtgacccagcaatcttcagttcaggttctcccaaaagcatatcctgaagccaaagatgcaggtggcttatttgggagctgtttcccagaagcacaagcgagtggggaaactgagccaggaagagcaaaaagccaataaatggtgcagagtctggagtagagggaggcacctagagcacttccctgactcagagtgagcacctccttaatttttgtttgtttgtttgtttgttgagacagagtctcactctgtcacccaggctggagtgctgtggcacaatctcggctcactgcagcctccgcctcccaggctcaagcgattcctgtgactcagcctcctgagtagctgggtttacaggcacatgccaccacacccagctaatttttgtatttttagtagagacagggtttcaccatgttggccaggctggtctcgaactcctgggctcaggtgatctgcccacctcggcctcccaaaatgctgggattacaggtgtgagccaccacgcctggccccctgcttaaattttgactctggtcccctaatttgacccaccctaattccagcccccaaaaaggctactgctgtgagcagctagaagtcatttgttctggggacagtcagaagatcaaggagtcatgtagaagtcgcccgagaattgaccctccaagggaaagggaagctgcagtatttattccattgctttcagccctcactgtttgaggactgctactgggggaatcaatcctgctacttccagtccattctgcatgtgggcagtagaaaggccttggtctccagcagagaagcagaaagatccaagcacgtgaggcaggaaactgtcagcctgtgtgggaactgaccaccatatccacaagccgaggggatacagtagagggcatcagctggtgtgctaccgtatattccagaaagccgcccacccagaggacaggtgtgagccttatggtaatggggagctagaggcaacctaagtgtccatcactgggggaataggtaagtaaaagtgctgtggttgtatacaccatgaaatacagtgcacaggaaacttgatgtacacagcttgtgaagagatctcagaagcagtgttaagttaaaaaataaaaaagaaagaagtagaagatttatagcacaattccacttatgtaaattggaaacacatacacacacgagatcacaaattataaagatacatctttgcagctatttatcaagtgcattatagtgggtgtctgtgggggtgcgatgggaatgggaattggcaatggaggaataaaagccttggagggtctttcatgggccaattgtgatcctgtgttatgatctgaagagtatgattaataactttctgcaccaaagggctaagaaaaaaaataaaggagtgaaaataggaaatgtctgcacatcagagcagtttcttacctgctacacaattactattactgcagggatgatgatagcaaggcaaccagactcaccgcctgccttctctccaggcagcccctccagtccccaggaaatgcgcttgcccccagcgaataaggagttccctacccctctcatgctacccagagggacagaaaggagaagtgggcctgctacccccagaggttctcatcttctacctgggctgcatatggaatagggagcaagtacataggactcatcataccccatttctgcctctatcccactgtgggaccttaggcaagtcactttgccttcctatgcctcagttatctcactagtaaaatgggcatgattattgtattagtcagggttctccagagagacagaacaaataggatgtttggataaatagatgatagatagagagatatagactagatagatgagagagatagactagatagagagagagagagagagagagagagagagagactagatagatgagagagagataggaggggatttattaggggaattggctcagacaattagggaggctaagaagttccacaacaggccatctgcaagctggagaaccagggaagcttgtagtgcagctcagttccagaataaaagcctcaggacttagggggtagctagtgcaagtcccagcattttttttttttctgagatggagtctcactctgttgaccaggctggagtgcagtgacatgatctcagctcactgcagcctccgcctccagggttcaagcgatactcctgcctcagcctcccaagtagctgggactacaggcctgtgccaccacgcctggctgatttttatatttttagtagagatggggtttcaccatgttggccaggctggtctcgaactcctgacctcaagtgattcacctgcctcagcctcccaaactgctgggattacaggcgtgagccaccatgcccagctgcacatcccagcattcaaagaccaaagagcctggagttctgatgtttaagggcaggtgcagggtgtcccagctcataagagagagcaaattctcctttcctctgcctttttgttctattcaggccctcggccaattggatggtgcccaccacattgggtaacaacgggtcttccttactcagtccattgattcaaatgccaatctcttctggaaacaccccagagtcatacccagaattaacgcatcaccagctatctgataaacttaaccagtcaaggtgacacctaaaattaaccatcacaattataaaaataactactcagagaaacattaggagcatgaactgaaattagttaatgggacattcttaaaccaatggcagaagctccttcttggccaggagcagtggctcatgcctttaatactagcactttgcgaggctgaagcaggaggatggcttaaggccaggagttcaagactggcctgggcaacatagtgagacccctatctctacaaaaataaataaataaataataaagtaaggtggtggctcacgcctgtaatcccagcactttgggaggccaaggcaggcagatcatctgaagtcaggagttcgaagccagcgtgaccaacatagtaaaacccagtctctactaaaaatacaaaaactagccaggcgtgatggcatgcacctgtaatcccaactacttaggaggctgaggcaggagaatcgcttcaactcgggaggcagaagttgcagtgagccaagattgcaccattgcactccagcctgggcaacaagagcaaaactacgtctcaaaaaataataataacaataaaataaaaaacaagcttttttttttttgaaacaggatctcactccatcacccaggctggagtgcagtggcacgatcttggctcactgcaacctccgcctcccgggttcaagtgattctcatgcctcggcctcctgagtagctgagaccacaggcgcatgccaccacacctggctaatttagaataaaaaagaagcttcctctctgccactcaggtagccttatccctaatctcagcctccgtcagggactccctgaggccagttggctgaaagctgcccagggagttctaaggatttcagtttctctttccttcttgatgcagctcccagctcacttggccctgcccacacctgttccctcatcaggctcccagacgggccccgcccactcatgcctcttaagtcaaagtggaaattctcatttccaattaccttttcactttacacacatcatcttggattgcccattttgcgtggctaaaaagcagagccatgccgctggggaagcagttgcgatttagccatggctgcagcttggaccgtggtgctggtgactttggtgctaggcttggccgtggcaggccctgtccccacttccaagcccaccacaactgggaagggctgccacattggcaggttcaaatctctgtcaccacaggagctagcgagcttcaagaaggccagggacgccttggtgagttcctgttgctgtggatgaaccacttctacgggtgtcccaattactgcccttctactgtgggctagcctctagccttccaactatggcaaacctctatcctttctgcactgggttaaacccatgctgtcaggccaacttcatccttgctgctatgagctagcttccagccatcctgctgtgggctaacccctgcccttgctctctaggaagagtcactcaagctgaaaaactggagttgcagctctcctgtcttccccgggaattgggacctgaggcttctccaggtgagctgaaagtcaggcccccttcacccttcccttgaccctctcccccctcttcttaagtggccccttagccttctttgtttcccttgtccttcactctcttggacctctcctcacctgtcctgtgcccctgccacttcaaaactgctctcttgactctgtccttcccctgggtcccttttatcatctcccatcggccccacttccctagctcgctcacctgtccctgtcacttccactctcactcttcatttctctcccaaatgtctccagtctgtcgcccacctgtgcctttcgtcctgctccacttctccctgtctgttcccaacactgaccccctctccctctcacctgcctctgtcacctgtccctcattatctctcactgacattcatccagctcatgctcccccctcatccacccttctcttttttttttttttttttttttttttgagacagagtcttgctctatggcccaggctggagtgcagtggcatgatctcggttcactgcaacctctgcctcccgggttcaagcaattatcctgcctcagcctcccgagtagctgggattacaggcatgtgccatgatgcccagctaatttttgtatttttagcagagacggggtttcactatgttggccaggcttggtctcgaaatcctgacctcaggtgatccacccgcctcggcctcccaaagtgctgggattacaggcgtgagccaccacacccagccctacccttcttctctgtgcatgcaactgtccctctcttactgtgcccccaacctgctttctcctcacccgtccccaccccgccccagagaacttctgtgacccccgtaagtcccctttcatttgtctccatttcacttatcccctcacctgcctccttgaccatcctgcctcacctgtatccttcctcatgtcttccccctcctgtctccttctccccagacccctcacctgtccccaccacatgcactgtgtcaccgaccttccccaggactgcctacctgtccccactaactgggtcttcttgcctgttctccctcacctgctctttctcacctctcctcaggtgagggagcgccctgtggccttggaggctgagctggccctgacgctgaaggtcctggaggccgctgctggcccagccctggaggacgtcctagaccagccccttcacaccctgcaccacatcctctcccagctccaggcctgtgtgagtccttggggcccgggcacccaggtctgtgggctctgagcagcatccttcccctgtggtggcccaggctccgcctcacacaccgccctcttctgcccacagatccagcctcagcccacagcagggcccaggccccggggccgcctccaccactggctgcaccggctccaggaggcccccaaaaaggtgagtgacccaggaagagaaggaccagggtctggggagccaataggagcccagaccctggacagcccctgacccatcccctcctcccctacaggagtccgctggctgcctggaggcatctgtcaccttcaacctcttccgcctcctcacgcgagacctcaaatatgtggccgatgggaacctgtgtctgagaacgtcaacccaccctgagtccacctgacaccccacaccttatttatgcgctgagccctactccttccttaatttatttcctctcaccctttatttatgaagctgcagccctgactgagacatagggctgagtttattgttttacttttatacattatgcacaaataaacaacaaggaattggaaccttctgtgataggtgaatccttgagtgtgtgtgtgattgtgggtctgtgactgggtgtggatgtctgggtgatgcaggcaaaatttgtgactcgttgtgtatatttgtgtgtgcctgacttctgtgactatgtatgtatttgtatggaaatgagtgtctgcctgaacttgagtctaaccaaaggtgcgtaactgtgcatgttcatgcccacacgtgtgcaagtatgtgtgtgtactgccaggcatggtggctcacacctgtaatcccagtgctttgggaggctgaggcaggcagatcacttgaggtcaggaatttgagaccagcttagccaacatggtgaaaccctgtctctactaaaagtacaaaaattagccgggagttgtggcatgaccccgtaatcccagctactcgggaggctgaggcaagagaaatgcttgaacccgggaggtggaggttgtggtgagccgagatcacatcactgcactccagcctggccaccaagagagaaactccatcttaaaaaaaaaaaaaaaaaaaaaaaaaaaaaaaaaaaaaaggccagcctccgtgggctcaggcctgtaatcctagcactttgggaggccaaggcgggcagatcacttgaggtcgggagtttgagaccaacctgaccaacatggagaaaccccatctctactaaaaatacaaaaattagccgggtgtggtgatgcatacctgtaatcccagctactcgggaagctgaggcaggagaatcgcttgaacccgggaggtggaggttgtggtgagcggagatcacgccattgcactccagcctgggcaacaagagtgaaactccgtctcgagaaagaaaaaaaaaaaaagaaagaaaagaaaagaaaagcggtcaggatgctacatcctggaacctaaccacaatggtgtgagaagcccagacatacagagagaccacatataggtactccatctgatagtcccagtatagcttttgaatcaccccagctcaggaaccagacatgcgagtgaagaagcatttagatgactctaggtcccagctggagcagagacaagccatcaccactgggccctgattaagttcctgacccacagaaactgtgagcataataatatttgttttacgccactaagttgggtttgttataaggcaagaaatcattgaaacagtgagagagccaccagcccatcacaattcactgtgaggtgtgtcacaagaaatttattaccaaaataactcatcagagtttcttttttgggttggggagagggggacagcgcctggctccatcgcccaggctgaagtgcagtagtacgatctatctcagatcactgcaatctccacctcctagtttcaaaccgtcctcccacctcagctttccgagcagctgggactacaggcatgtgcctccacccccacttaatttttgtaatttttgcagaaacggggtttcgctatgttgcccagactggtgtcgaactcctggactcaagaaatcctcctgcctcggcctaccaaagtgctaggactacaggcgtcagccaccacaccagctccaccaaggtttctgaatggttgactttttgttacattacaggggattcagaataaaattccattcttataatcctataactctcacttctttgtatcgtttgtttgtttgagacggagtcttgctctgtcacccaggctggagtgcaatgacaagatctcagctcacagcaaccttcacctcctgggttcaagcgattctcctgcctcagcctcctgagtagctgggactacaggcacatgccaccactcccagctaatttttgtatttttagtagaagcagggtttcaccatgttggccaggctggtctcgaactcctggcctcaagtgatcctcccacctcggcctcccaaagtgctggaattataggcatgagccacggctcccagcctcctttgcactcttgagtattttcttgattaggagtcagagggctgaagtacagccatacacagaaattacacacaaccaacgggcaaaagttgaagcactccctttgataaccaaaaacaagttaaatgttcccaggtgtggtggctcacgcctataatccctgcactttaggaggcctaggtgggaggactgtttgaccgcagaagttagagaccagcctgagcaacatagcgaccacatcttcacaaaaaaacttaaaaattaggtaggcatggtggcacatgcctgtagtcccagtcccaggaggatggctcgagtccaggaggttgaggctgtagtgagccatgatcgtgccactgcactccagcctgggtgacaaagtaagactgtctcaaaaaaagaaagagagagagagagagaaagaaaggggagttaaacgtaaaaaagctatttgtaaatgtcttaaaaatttacacataacctcacagccattcccactacattataaagtctgtgactagcagaacctcagtttgggtagggggcagcatggtgccctgcccaggacatgaatttctgtcccttttgcctgatacctgctttcccaggctccctcgcagctcagggtggccatgaaattaagggcttcttaaataatttatgctgggtacagtggctcactcctgtaatcctagcactttgggaggctgaggcaggcagatcacttgaggtcaggagtttgagaacagcctgcccaacacggcgaaactccatctctactaaaaatacgaaaattagccgggtgtggtggtgcgtgcctgtaaccccagctactcgggaggctgaggggcaggagaatcgcttgaactcaggaggcagaggttgcagtgagccgagatggtgccactgcactccagcctgggtgacaaagcaagactccgtctcaaaaaaaaaaaaaaaaagttaatttatgtaaaaaatgtaacagagcttggcaaaggcggagccccatacatgtgtttgttgctgttactcttattattttaacatatttttcttccttaatacaaacagaactctttcccacttgttcccttccttcctgcttagttcattggtatgaggatgtgagacccagagctatggcaaccattttgtgaccacaaggcaacaagtttagggtgtgaagctatcattttgaggaaggtagaacaaaagagtagaaaacggggtccttgctgatattaataagccattgcaccaaaccccagaatcccctaactccagacttactcttaggtgacataactgaatgtctttcttgcttaagtcgtgttaattggatttttctgtttcttgtggccaaatgtatccccacaaattcatctctgcatggccagcactgaacccagagaatgtggtcaattaatatttcataaaaattttaatcatataggacatgtctgagcccaggcatatgagtctcttcaattatgaatgttgcaatggaagaaaacaaggttgcaaatctctacttggagatgccaaggctttatagaagagattttgaactggatatattttagttttgcctgagcagcatccattactcctggtaacagtgcttcaattttccttcggaaatgacctcctttcctactccctcatttggctggacacatgactccaatttgatcaattagagcaagcactccatctccagagcacagtaacaagttttccttgtcctctctcatggtggcctttgcttaagtggttccctctgcttaggacagttcccaccactctcccacgaccaagtcttcacctggctcatttccacaatatcacttcctcctccaaaaatccttctgcatagtacaccggggtttctattgctttattttttattttatatatatatgtgtgtatatatatatatatatgtgtatatatatatatatatgtgtgtatatatatatatatttgtgtatatatatatatatatatattttttttttttttttttttttttgagacagagtctagttctgtcacccaggctggagtgcagtggtgcgatcttggctcactgcaacctccacctcccaggttcaagtgattctcgtgcctcatcctcctgagtagctgggattacaggcacccgccaccatgcatggctaatttttgtacttttagtagagacaggattttaccatgttggccaggctggtctcgaactcctgacctcaggtgatccacccgcctcagcctcccaaagtgctgggattacaggcatgagccactgtgtccagcctctattgcttttatatgctcaacaagctttcttatttttttttcttttttgagactagcatattacagcaacaagctttctttgttttatttttttttaagatcttgctctgtcatccaggctggagtgcagtggctcaatcatagctcactgctgcctcaaactcctgggctcaagaccacctcctgagtaactgggactacacgtacacaccaccatgcttggctaattttttatttttatttttgtagagacagagtctcgccatgttgcccaggctggtctcaagctcctagcctcaagtgatcatcccaccttggcctcccaaagttctggaattacaggtatgagccaccacacccagccaacaagatttcttatcctactttttctggagagtatttaccttcaaccacataaaattgccaatactatacaatgtgtgacctacaaaaatggcaagttcatgtggttcaacctaatatttagcaatccctacttcccaggacacacaaccgggacataggacccacccaccccctacctggccaatcaaagcattccattcattcccttggatgcggcaatcagtgcaggggttgctatgtgacctcggccaggccgataagagctcttccctgagatttttctcttaggactagagattctgccattttatctctgggctctggaaagattgagtctgtgtctgtaaataaatgaccattttcccccgccacatgcagttgaaagggatgagtctgagctgagccaagcagagaagagagctgtgtagggagagtgtcttggtggggttgagtctgggttcctttctctaaagctctgttccttgtagctttgcaatcaccccacaactttttctttttttttttatttttgagacggagtctcactctgtcacccaggctggaatgcagtgatgtaatctcaagtgattctcctgcctcagcctttcaagtagctgaaatcacaggcacccaccatgcccagctgatttttgtatttttagtagagatagggtttcaccatgttggcgagcctggtctcgaactcctgacctcaggcgatcctcccaccttggcctcccaaagtgctgggattacgtgtcagtcactgcacccacccccaattctgttttgaaggtaggcatacctcaccccaaagctggggtctccatagaaatcagaccacataccacccctggtaaagacccttcattggcttcccatggccccaaagaataaaatgttaactcttgaccacacctcacaaggttctgtagaacccacttgcttctcccacctactctcctctcactcttcccacttcagtccagacacactgcctccaacacatcaagcacactacttcctaagggtctttgcacatgctgttccctttgccaggaatgcttttccctgcttttctcacaatgcatttatttagctctgtcatcaccatccttcaccctcccacctaaagtaggcctcaaagtcattctctatgccatcatcctgttttcattcttggcacaacatttatttgccactggacatgcattatttactcgtttttgtttgcttgttttttgggtctcactctgccacacaggctggagtgcagtggtgcaatcagggctcattgcagcctcaacctcctggactcatttaattgcttatttgtttatttctcctccctctagaatataggcaccacggagcagggctttcttgttttgtttcatctattttgttcactgcgatagcccctacataggaccagttacataatacatgctcaataatgctttatcaagtgaattagagacaagattcctgatggttctgtgtgcaggttggaggcagtcagctttccaatcatggctctgctgttaactggctgtgtgatcttggagatgctccttaacctctctgagcttcagtttcctcatcttgaaaattgtgtgcacacactgcatatacctgtgcaggctttaaatgcagtcatacttattattggagtaactccatttcctaagcattatgtgccatgcactgggttgcatgctctttatccgtgcatcagggagggtttgggagcactgtgcctggcttgtgaaaagccctcagtacctaggagtcgtcatgactgacacaaatgagggtggttgggctcctgggtgaggaagcctcctggcctgtgattctctggtgcctctgtcctagcagcctcccaccctgtctgcctagatccatccccctccctcctgctccgtttctatttctgtctttctctcctcctcccctggcctcagggggcccctggctggcaagaagccttcctccttcttccccaagatcaggaaggtgttatcactgcagggcccctgcaaggactgggatgtctgtccctctcctctccccaaccagctttccttccccagccacagccctcagcctcacctgagaaactcctctccccacaccatcctccatgccctccgccagggtccctcagattccaggcagagcgacacaagaggtcttgtccctgagctcaccaggctagctgtggatatccaagctcagctaagctcatgggggccataccccagcttccggacacagaccccagaggcagcatagtgtaggggtacaatcaaacttccagctccgctatttattcattggggggatggagggactacggcaagtgacttcatctctctgtggttcaggttcttgtctgtaaaatgggaccaaggatagatctaccctaccccactgagttgtgaggtctcagagggtggaatgaatattcaataactgctcagcagtacagtgctctagttgagtattaaaggagttcagggaatgtcaccccaaaatatggcaccctggtatgctgattattttaaattaaaggcacttagagatccatagatgctggaagaggctttcctcctatgtcttcttatctgcctaaagatcaaaaagaacacaagtgccttctgtcctctccctgacatttcattatctttaacaggaaaaaaagacagagaaatgtctacacctggacggactttgtcacaagaaattatctgtctgtcagtctcaaattccagagacatttacaagctaaattctatctcctggacccatttattttccccaaaatcatttattacccctcaaaattgccttcctttccccatctcccctcctgtgaagaaaggtatataagtatataaacctcactgggttattgggtaatcactttcctgtgattttcctagtgcatgttaaataccctccatattccttttctcttgttaatctattgtcagcccattccagtgaaatttcagagagtgaaggggaagctgtcttttcacccctatagtagagactcagaagttggcctgcctgcctttttaaatcccagttttaccaccttgggccagttatttaacttttctgggccaaaattccctcatctggaaaacaggataataataccgatatgtcctggtgttgtgagaattaaatgacttaagtgcttggcacatagtaagtaagtattcactaagcgttagctattatgatcattttatttttgtgattattccccacctctaagtctctcagaggataaaagcctgtctgccagtctcctccggccccagttagtcatcttcccatcttccttcagtctcacttagagtccttatgctgcaatctaggtcaccctcccccaacacacacacacacacacacacacacacacacacacacacactacacgcggacacacatacagacacacacacaggtcagcagggcctcagacacagaaaaaagtttaattctgctgcggcggagggtcccggctccggtagggagggggatttggttttggattttgttcgtgtggggatttatttgggagagtctggtccttccagtgggacctgcccgggagaatgagtaaagagaagaaatcaggagagacagggagactagacaaaaccagggagggccgagggacaagagacgacaggacagagagaaaggagaggcaaatagggaaagacaggcactacagagagacgacaagagggcgggatagagacaaacgagggaaacagagaaagggggaccccaagccagacccgaccggaccaggaatgtgcgtggggtggggtgggaggctttggaggccgccgcgggacagaataggatctagtccagccagatacaagaaatgggcccctcgccccggccccgggtgacgggctgggggagggggctcgtgtctcagtgctgcagtgtcagggggccctgcccctccccgcgcttcgctgtgtaaggcaccggctccagcgaggtccgcgagcgcgcgaggggaggggtaggaggggggtcgaggagtccataggggaagggaggccggcagccggtccccgaaccccgccctgggcacgggggcgtggcctcgagccgcagcccgaggctgccccgccccctcccggggacaagggcgcgtctccactctggtccaatgtcttggcgctgcgctttctcccagtcccgccccagcgtccgtgcggctgggcgtttggtctgcggcacccaggcgtcccggcgcccgcccgccgctcacacggtactctccagcatccactcggtgctggtgaaagccaggcacgccctggcggagcccagccccaggtctccatcctccccggccgcgccccctccagccccgtccaggtgcggcgtggaccggtggcgctttgtccgccgggcgcggcgcgggtaactgtggctctggaatagtgccccgtagtccccgtcgaacgaatagcgctgctgcggcctcggccgggccgcggctcccccaggaactagagctagagtagggggcgccgaggttggtggctccagggcgccggatcggctccttcgagggcccaccgcggcccgagactcctccccggaagtttcctcggatggcagcaggcacagcgaggtggccgagccgcccagagaacgtccaaggaccacctccggctccgcggatgccgtctcggcctccatggccttggcctcgacggcgacggcgggggcagcctgggactccacctcgcgcagcgcctcgtagtggtcctgggccggcagggccggggcctgtgccgcgcctgtgcctgcgccgttggtctgcgagcacacgtggctgacccgcgggagcgacctggagcccttgacgcggcggctgtccccgtcgccatacaccttatagcggatcatgagcagaacgatgaagacgaggaccgaggcgacgatgacgcccccgatggcgatgatcatggtgccgcccaagaaatgggccctcagcgggcggcagggcgccggatccccagcggtggtgaactgtacacagcccaccactcgcgttgccggcagcgctgtggccccgtcgtcgtagaccgccagcacgcacaagtcgtaggcacggcccgccgccaggtcattcaccaggaaggtctgactggtggacgggatcatcctgtaggagggggcgggttcagggcggggttagtccccccgaaccacgccccttcgctttatgccccgcccatggtgaacagtggggactaaaccctgctatcgaagtctcagccgctactgagacaacagcagcaattcaagccccgcctccatcaacatattcccaccctttcacacccctcatctgtatgccccgccctcagacccacctcctggctgtgtcccatcacccactgggacaatatatctatcattcgtattacctcctctgcatatcccggcccctgcaggggagaagtgctatggcttttaagccctgccctcaagggacatgctccctagctatgtctcactcttgctaggacaactgccattcaaggtccttcatctaggcatttctaccccaaaactgggccaacgctactggccacctccccttttctgcatgccccatcccccactcaggtggacactaaggtcagctcacagcgcctgtcatattcctactggaacaatggatgctcttctagttcctcttttatacatattcctgcctttcagggaaaaccatgatgcaggtcgctcccccttatctgcatgcagcacctttgggtaaaacatctagctttggccggctgcagtggctcacgcctgtaatcccaacactttggaaggctaagaagggtggatcacctgaggttaggagttcaagactggcctggccaacatggtaaccctgtctctattaaaaatacaaaaattagccaggcgtggtggcaggcacctgtaatcctagctactcgggaggctgaggcaggaaaatcgcttgaacccgggaggtggaggttgcagtgagccgagaccacatcattgcactctagcttgggctacaagaccgcaagaccgagactctgtctcaaaaaacaaacaaaccaaaaaaaaaaaaaaaaaaaaaaaaaaaaaccatctagctttgtctatgtcctggaacagtttccaagtcccttaactacatgttccctgacattgctacaggccattccccaaccaaatgaaatgtggcttccaggcacaccccacaatggcccactaaggatggttcccctactgtgtataggccacatccagactacaggccctgctccttgtccagatattaaaggcaaccacctcatatgttcatgtgccaccagaagtcaccaaatcacgctaccaggtaagtttcttccgtaaaggggtcaaacgtagccaagcacacaccatattcctttcttgctgtaggcccctcccctcgaatgaagactagtgtagagaagtggttaagatgacaaaggctgggggccagattgcccgggtttgagtctctcctctgccacttgcttgctctgtgacctcaggcaagtttctcttttgtttcattttgttttgtttgagacagactctcgctgtgtcacccaggctggagtacaatgacgcgatctcggctcactgcaatctctgccttccgggttcaagtgattctcctgcctcagcctcccggacagctgagattacaggcacccaccaccacacctggctaatttttgtatttttagtagagatggggtttcgccacgttggccaagctggtctcaaacttctgacctcaggtgatccatccgcctcgatctcccaaagtgctgggattacagtcatgaaccaccacgcccggcgaacttcgccaagtttcttaacctccctgtgtctcattttccccaaatggggatgataataattcctacatcatagagatggtgtgaggaatgaatgagttaacacagccaggacctggcacttaatgatatcatcattagcttgcatcacacctcgtgttggccagtaacccttgctgtggctcacactatccagcccattgcattcctcccatctataagatctacccctctggagggccattcctgctaggccttggccctcttctgttgagcacatcgtttccacactgtgggccatgtccagcctcagctaaacctggactgcccgttccacattgattggcatggccaggatgcaacctcacaagctctcttctccagcaaagactcttggtgggtcccgggagacaaggactgccccttcctcttcgtgggaccatgcagaacaagctccaccccctctgacaggccacatccccacctccgaaggcctgcttatctctccgatgcttccgcttcccctccagcagagccaccttctggccctgaagctccacctctgtcatcccacctccaggaggttctcccactaccaagagccaccctcccaccaaaagacttccaatcagggccccgccccttcataaaggtccacccacttctccaactccactctacccacccctgactgccatttcaaagaccactgccacccaccccagccaccctcggctgccctggctttaagccttcctcctcctctcttcatctctcctctccagagccctggattccacttgctccttcccctaaatagccagttgctaggggcttcccccaccccttttcaaggacagaggctggctccttaagaaagcttcagcccaagtgtctctaattggctgcagaattaaagcaagcagctaagcaggcttctggttggctgccacctccgcccatgacagcgtgaggaagttaacccctgcggcaccatagcataggaatctgcaatgggggttggagaactggaactggggccctacagggaagagaagagtcccagggtctgttgcccagctggggacagggggccatcaacatctgcatccatgcagggtctgggggcttgtgaacctcccccaccccaccatgtggtggccatggctcagagcaaaggaaagagagggacagagaagtggagagtcacagaagctcagaattatttacagaaatatattatccatctcccttccaagcagtgggtgcccaacaaatgtgtgtcagtgtataaaggacagctttgctactttctgtgtgaccttgggcaagtgacatcccccactgaacctcagtttttctgtctttgaaatggagagggggtcatcacgccttcatagcggagctgggaagatcaagcttggaagttcgttgtgaaggtttgtgttttgttcatttgtttgtcctcatgtttgtaaggctgggccaggatctaacctatctcagtaggcccagggcccaacacaagatgggcacacagtaggcatctactcagtgtttgggaccagaatcaaaaagagagggaaatgaggaagacagagacaaaagaaaagggaggctttttttttttttttttttttttccagagggagtctcgctctgtcacccaatggcgcaatctccgctcactgcaacctccgcctcccaggttcaagcgattctcctgcctcagcctcctgagtagctgggattacaggcacgtgccaccacatctgcctaatttttgtattttccgtagagacagggtttcaccatgttggccaggctggtcttgaactcctgacctcaagtgatccgcccgcctcagcctcccaaaatgctgggattataggcatgagccatcgcgcccggccaagaggcatttttttcattcaaccaacactgggaaagcacctactatgtgccacacctatggccaagaaaacactggaaaggcagagatggaggccaagaggcaggtttctcggtgaagatctgacagccaggagctggggctctccacaggtagggaaacagctccagccccgctggcatctccaggtgaagccaagcagatgactgaagcatttaactggtgctctacaatgtgcatgagggaggcagagctagaaggagagacatccatgtggcaaactaccatttatcaagtgcctactgtgtgacaattctgtggcagagagccatactaaaaaactaccaagatgggccaggtgcagcggctcacacctgtaatcccagcactttgggaggccaaggcaggaggatcacttcagcccaggagttcaagacctgtctgggcaatatagcaagacctcatctctactaaaaatttttttaaattagcccagtgtggtggtgcacacctatagtcccagctactctcaggaggtaggaggattgcttggagcccaaaagtttgaggctgcagtgagctatgatcataccactgcactccagcctggggtgacagagcaagaccctgccaaaaaaaaaaaagaaaaagaaaaaaaaaaactactgagatggagagacatggcaaggccaggactgcaactcatagtgtactatggaccacgacctactgggctataagctccctgaggacagggtctgggtggtttccctgtgtccccagcacccagctcaggagtttgcacaaagcaggggctctgtgcctaacgagggcagagaaggtagagacagacagagaggtgaaaggagaaataaggaggcgatgggagaaaataactctttttttaaaatgtctgttgacaccgtatggtctgtccccaccagggcaatggcttcaaacccaagtgagggtggaaataacatatttttctcatacgttttgttttctgtttctgtaatgtacccaatgtgttggttcagtagtactggtatataatttataaatataaatgtcgctgtaggctaggcacggtggctcacacctgtaatcccagcaatttaggaggccaaggcaggcggatcacttgaggtcaggagttcaagaccagcctgcccaacatggtaaaatcctgtctctactaaaaatacaaaacttagctgggtgtgttggtgggtatctgtaatcccagctacttgggaggctgagggacgagattcgcttgaacccgggaggcggagggtttcagtgagctgagttcgtgccactgcactccagcctgggcaatagagtaaggctcagtctcaaaacaaacaaataaataaatgtcactgtaaatgtgtgtgtgtgtttcatgctccaaaatgtttaactgaagaggtgcacaatcagattgttgtggggagcagtgatatcgaccatgagccccatgagggcagggttcatgctgagctcagtcactgttaggactccagtgcccagccctggtcgggttcatgtaggtgctcagcgaatattttctataagcacgaaaaacagagacagtgagaaatagagagaggagacagggcaaaggagggcgggaacagctctcacagccatctagaaccctggctgagcaagaaggccaagggaatgggcaggtgggagggagggtccccctgggcttgggaggaggccctgggactgcagcacccgcacccacctgtagacgagggagtcatcaacggaactgttgtactgaacctggtacatgcgtattccgggcacaggcctctgggctggccagcggatgagcacggagttcgaggtgagctcggctgccacgagccgacgctcagccgcagaatcgttggcacctggtctgcccggcgtggcgatgtcagaggagccgggctcggtgagaggcggcggggcagccggcgggggtgccatcagaggcagaggtaccacgcacacctccacgggcgccgtcgcttccccagcagcattggaggcgatacaagtgaaggtgccactgtccctcaaggtggtgatggtcacatccagcgtcccgtccccccggacccgggtccggctggagttccccagcagccgcccatcaggtgccacccagtgcaccaccggctcggggtcacccaccgctcggcagcgcaggctcaccgcctggccttccaccaccagggcccggccccccgcctgccgtgtgatcagcgggggctcacacaggaactcctcctcggggatggaccagaagtagcggtcggtgaggtgttcgggcgtggcgcaggtctctaagtcgtcctcgcgggtcagccgccgcagccagagcagctcgcagttgcagtgcagggggttgccgccgaagctgacggtcagcggggtgggcggcttgggcccggtgccctgcgacctcaggaagagcccgtcgggcgggagtttatgcaggcggttggaggtcatgtccagacggaccagcttgtgaagctgcacgaaggtcccctccgcgatgtggtcgatgaggttgtggtccagcgtgagggtgtttaggttcaccatctggcccaccgcctcccacggcagggcctccaggttgttgtaggacagatccaggtcctccacggtggacaggaaggcgtcaaaggccgccgactccacccggcggatctggttgtttccaaggatcaggtggcggaggttgcccaggccgcggagctggtcgccgcgcacctccgccaggcggttgctgtccaggtgcagggcccggagggcacgcaggtcggcgaaggcgccagctgccacctggccgatggtgttccgggagagagtgaggtgcaccaggctggtcatgttggcgaagtctcggcggcgcacggcggcgatgaagttgtcggtgagccgcagctccaccacgcgccggtcgatggcgggcggcacaaagagcaagccggtcttggcgcacagcattgtcagtgtgggcgccacgttctggcagatgcagcggccggggcagggctggccacgagatgcccccgcccagagcagcagcagaaagggcagggcagcgggcggcggcgagaggagggccgaggagaagggtcctggagccatggtgcagtgggaaggcaggaggggtgggaggtgagacctgccggggaaggagccggttacccaggcgtgggacttggccgccatgggatgtcctgctacgagtcaggcctggatccctcccctaccgcctacagctgggttccataggatggtgagaggaagccactatcagctattaacaacagattacaacacttccatgctgggcacagtggctcacgcctgtaatcccagcactttgggaggccgaggcaggcggatcacctgaggtcaggagttcaagaccagcctggccaacatggtgaaaccccgtctctactaaaaatacaaaaattagctgggcatggtggtgggcgcctgtaatcccagctacttgggaggctgaagcacgagaatcgcttgaaccagggaggtggaggttgcagtgagccgagatcacaccattgcaatccagtctgggcgacagagcaagactccatcttaaaacataaataaaaataaaaatatctctatactggttgatagaatacccctgtccctacttgcgtgtcccaccctcacctctgcccctcctgtagtagctcccaaacctctcatgatctcccaaccagaggggtgacacctggcccaacctgggccctccagtacccactaaattgtctaaaaaatcactgttaactatggtttaaggccctggctatccaagccatactccctagctccaaatcccagctctgatacttactagctgtgtgacctccagcaagtatctgaacctctctgattctcggtttcttcatctgtaaaagggagatagaaacaggccttacttctgtgaggattaaatgtattgatgaacatagcatacttagaatagtgccaggcatataaaatgtgcttattacatgttagcaatcatcatcatgatcatcaagtgcttaatatgtaccaggcatagaacagtgccctattattgagagtaagtactttgaaatcaaacagactcaggttcaaatcctgattccccttttgctagctctgtgacccccaagccaatgatttcccctagctaggctgtaatttcttaatctgtaaattgggatgataattgtaccatcttcattcatgtaccaccgaccatgcctggcatacagtaagtactcaataaatgttaagggtttcccccctcccgcctctggcattggcagggagagtgtcaaagtgggagggactgaggaaaacacatcagagtcttccagttcagcctcaggaaggccttctctgaggtctggtttcatcctgggctcagttgagctcccaagcaaggcagactttcatgctcacatctttgggtacacacaacacacacacacacactcacacactcacacactcacgctatgtctctgctccaggcaaaaccttccggcagggattccccctgcggcggctgcagcccacgacatgtcagttcccatcacaacacagggtgggcggggggtgaagaggaaaggatgggaagggggcgtccctaaaactgttttcaccccaccctgccctgtaccctagcccctgctggcctacctcccaggaatctgtgtttggggctacggccttaggtggctttgatcttcctgccagtggggagggggcctgggacagagaccaggaaagtcagagacagaggtgaagagagacaaggagagaccagggggagggagaagtggactggcaaagagagagagacagattgggagagaaacagagagacaaaaagatgagtctgaaaggaaggtgaacagacagaaaactgagagtgaagaatgagacacagaaaagagagagacacagaaaaaagacacagagatggagagaaaaatagagacagtattagagagaaaaagacagaggaggaaagagacagagagtaagagagacaatgaccgggctgaaggcggaaaaagaggccggatcggggtgtcctaccatctctgagttcaccccaaatctgtccttcactccctctagatcactactctacaatgtactggaaaccctggcctagaaagggggactccagaattaggagcctgagtctgcccctgcttggctgtggggtcttcagggctcagaatcccagtctatgaaacagaagtccagagcctcgcctccgacagctggggtaggactcaaatggagggaataataatagcaatggaaatagctaacatttatggagagtggtgcagcactgcaggacagaatccgccctactgcctgggttcagacctcacctccccactgtgtgactttaatcaagtgacttcccctttctgtgcctcggtgtgctcatctgtcaaatgggaataataatggcacccacctcataaggttgctatgaggatttaatgagataatattttatgacatgcttagaatagttcctgacaaagtaaacactatatacatgtgagctgctgctattatcattattattattactattattattactaatttattattttctccagctttctcagccaccaggaggtcaggctatcgggagatcttcccacacccatgcacacgcacatacaaaatgggcaaacatattcactcaaccctctaaatgcaggggtcatttcatatcttgacatattcttgtatcctttactgatatcatgaggaaaccttgctttcccaaacaccttaaccatcctgagaatgaatgtctcttggcctgaaaccccccacctgctccccagagccacctggccaccacaagccctcacccaactttgatgttcctgaccttgtcaccactccccagccttggacagagtggtgggcaactggtccttcaggaaactgtcatcccctgaactgaaatccatgcgaggcagggttccagacccccagctggctgacagcaagccccatcaccccccatgtctctctctctctgaagccttacggctctactcacctctcttcagggagtcagggcctgggccagcacctgcaaaggaacagaaccaccttgttagcatcgttctggctcttctctgtgcaccagatcttgccttggagaccatcccggccaaggaagtccctggtgtgatcacgctctcagtcctcctgtggcgggttttgcatagtctcacaggaacccagaagtcctctctggaatcctagattaggcctcagggttgttcaccctccaaagcccaggagtcgaggactttagccctttgtcctctggggtttcaggagccaagaaccccagccccctcttccctctgacccaagagtccagaccagacctctggccctccattagaacccaagagtttacatcccagcccctcaactccaaagtcctgaacggtaccaagagctggggaagggccaaagtttcccatccttgccatgatactattgcccacaccaacatgtgtgtccatgtcagaacccacgcaagcccacaacccaagtctctacatctggatttctatgaacatagcaacatgatctgtgtgccctccgccctctatgggcacttggcctggcatatggacacactgtgtccagggaccccaggcgggaccccagtataccagaggtcatgccacatgggcctcaaacccactgaacccaagagtagggacagccttgtgccagggcacagacacatgtgtctttcacatacatgtctgaacatacacaacccccagagaccaacaccaaaacacaaacagactcacaacatagatggatacataccctcaaggttgacacacctgcatgcaacaatacatgtacaacactgactctgccatgcaagttcacacacacaaatgcacagatacaacagagaaactcatgtgccccctaacagacaaccaggtacatgcatttacaacagatctaccttgcacactcaccagcacacaggggcacacacatctaacaaacacacacacacctgtgcaaacatacacaagtgcacactcttaaatgcctagacacactcatacttcacacatctccatgttgcaaagttgatacagcaccacgctaacagatacatacctcacacacacacacacacacacaaaaccacaagcatacagatacgaggctgatccacactggaacacgcacacaggcacaaaaagatccacctttgcagacacgccaagatgttcactcataacagacacatgctcacacaacagtcctgtgatttacacacttccaaatgcatagaaaatactgaaccacagtagcacagtcagtagacaggcccagattcacactcacacagtcttggacacacattcctcccagccctgaggcacccccccaccaccccacctacttacttcccaggcccaagaaatcctaacatccctgcagcacattcagcatcctgccctccacacccccaaaaaaccagggcaaaagccaggccagaggtcagagttcagcaggtggaaactcaagaggatttgggggtttgagtcctagatcaccgtttcaaggagatcctcccaccagcagccccaaaggttccccagcctggccatcaggatggaggtaactctggctccgtctgcagatgtctggccggtgggggaattagggtggagtgggtggggaagggccgggtcttcgccccccaacccccacctcagggcccatctgtccatttctcggcctctcatcccccctccatctgtccacctcctggccgcccatcccccccccgcaaccaccgggaaggggaagacatggccgcttcccccaggaccgctaaggaccccccagttgacatggaccgagggagcggcgaactcccctcccccaaatccacaccgaggcctgggcgccgagcctcagcccccaagccagcaacctgccgtggactcacagatacacaccctcggagacatacaacccgcagacacacacacacacacacacacacacacacacacacaaatggacacccgagcgggcacacccggctccacagacccggggatggacatccaacccggacacaaacacccagagcagctagtcgcgcacgcacatgggcttgggggggacccacacctgggcacacaacccacgcacacacacacctgcacacagcccctccgatgggcgcgcgacagcgcccagacacacagccggaggggcggccgctcggggggacacgcgtgcacagccggacacgccggccgggctcgacaccccgcgcacacccgatggccacacgggcagggcgccgcacacgccggcaccgggcacacatagggccgcgcgggcgcacgccgggcccgccgcagcgccacggacacacactcgcacgctcgcacgctcacacccgcgcacacacccgcgcccccgcccgccgctcccgggccgctgcaggccgcgctcacccagcccgggggggccccgggcccggccccgccgccgctgcctcgctccgcgccatggtggggggagggccgggggagggggcgcggtgccgcggggccgcctccctcccgcctcccgccctccctcccgagccgcagccgagctccgccctccgcgccgcccgccgccaccgccgccgcaaggggggagggggcgccgactggtgggggcggccgggcggggcggtcgcacacccgggatccccgccccgaacccgccgcagacccctctccactgccgagccgccgcgggcccgcccccgacccttccccagccccacccccagccccgccggcctccccggagacccccccagaccacgccccaactggcctagggaccccggatctccctacagagacctcccatcacgtcctaatacccagggggacctcggatcaggcctcacctcttttgagaacccaggcgatgttctagggccacccaggaccacaaatcatgccctgctctcctgcttgacctcagactatgacccacacactgtcaggaaccccagaccatgcccccaaacccagaagaatcccagatcatatcccagcatccaaggggatccagaccaccccaccagcaaccctaaatcatatcccaacattcagatagacccccagaccacaccccttccctcacggaccccaaatcataccctaacatcgggggagacttcagaccatatgtcagccaaatcccagatggtgcctgactccctttggggacccaaaccacattctacagccaccagaaccacaaatcatattccactccttcttggggacccccagccatgtccttctaccctcaaggaccctaacccattcccttacccccagtatgaactccaaaccatgcctaacttctagggggccctaaaatgtctcttatccctatggaagacccttaaactttccccatgaaccccattagaccccaaaccatcttccacccctttgaccttacacctttctctctccttctcctccaagacatcctttggtttccaaaactccccaattagccccaattttttcccaccccctactagtcctgcccccttgaggaccctgcctccttcttgctccagttctttctcttggaccctgaaagtcccccctccctgtgacttccatagagcccagaatgccttgctccttcctagttcagacccctttgcccatcccctgtcccatagctgaaccccaccccttccctcaaaccccactgagtatctcaggccactctccttctctttctgagatattcacagggtccctaaacccagcaacttctcccctaaaaatctgtgttgtttcatgcagtgccccagattcctggggtctcaaacccttctcgttttggatcccactgtacagaggtcctcctctaaacccctttcctaatttttttttttttttagacaaagtctcactctgtcacccaggctggagtagagtggcacgatctcggctcactgcaacctccacctcccaggttcaagcaattctcctgcctcagcctccctagtagctgggattacaggtgtgcgccaccacgcccggctaatttttcttttctttttcttttttcttttctttttttttttttttttgagacagagtcttgctctgttgcccaggctggagtgcactggcatggtctccgctcaccgcaacctctgcttcccgggttcaagcaattctcctgcctcagccttccgagtagctgggactacaggcatgtcccaccatgcctggctactttttgtatttttagtggagacagggttttgtcatgttggccaggctggtctcgaactcttggcctcaagtgatccgcccgcctcagcctcccaaagtgctgggattacaggcatgagccaccgcacccagtctaatttttctttctttctttttttttatttgtttgtttttgagtcagagtctcactccatcacccaggcaggagtgcactggtgtgatcacagctcactgcagcctggacctcctgggctcaagtgttcctcccatctcagcctcctcagtagctgttttgtttttggttttgttttagtttttttataaatggagtctcactatgttgcccaggctggtcttgaactcctgaccacggtggtcatgagctactgtgcctggcctaaattatttacatgaagcccgccctatcccccagatcaagctcagctctgcagataactccttctggtgaaccttaaccccaagcgcaactctgagatgtccctggggacactcacaatccccctattctccagactccacccttcatcgccaccacccaggcagcatccccacctcccaccgtggttgctagtgctccctgctggagcttgggggtaggaataacaacaacaacacaagtgaacacatatacagcactatttatgtgccagaaatgattctaagggtttcacatctatcacttcattcaatctacacaacagccaaatgaagaggtcctattaccatccccattttatggataagggaaatagaggcacagagaggtttggtcacttgcccaaggtcacacagatagtatgtggcagaacagggtaggggtgatggggaaagagggtgagggtaggcctgggctggacaggagtagaaaagagagggagagaaaaaaagataataataagagagacagatggaagaagaaagaagctgaaaccgagggagatatgccttattcatagagccaatctggccctgtgagctctggtcccagctgaccctatttccaacgactctcctcttctgttccagcttcttcttcttcttttttttttttttctttttttttttagaaatgggggtctcactatgttgcccaggctggtctggaactcctgggatcaagtgatcctcccgcctcagcctcccaaagtgctgggtttacaggcgtgcaccaccactcctggcccctctttcagttttaacaatgacttttcttttcttttttgagacagggcctcactctgtcacccaggctggagtgcagtggcatgatctcggcttactgcaacctctgcctcccaggctcaagcgattctcctacctcagcctgagtagctgggaccacaggcgcccaccaccacacccggctaatttttgtatttttagtagagacagggttttgccatgttggtcaagctggtctcgaactcctgacctcaagtgatccgcccacctcagtctcccaaagtgctgggattacaggtgtgagccaccgcatccgaccccttgttcagcttctacgatgactttcctattcctccaacacaccagcccacagcagcagcccctgagcatatgcactcttctcccctttccatggctgctggttctttcttttcatgatggtcttaaatgtaatctcttcaaagagaccttccttttccatccccaatttacacacaccatccctacctgggcccccaaccagcagtctgatgttactttgaaatagaagaagaaggagaaggagagaagaaaggaagaagaaggaggaggaggaggaggaggaggggaggaagaggaggaggaagaagagaaaagaaaagagagaagaaaagaaaggaagaggaagaagaaggaggaggaggaagaagaaaggaggaagaagaggaggaagaagaggaagaggaggagaaggaggaggaagaagggtggctggatggatatatgatgaagtaataccttgacgtgtcagtggtggcatctaagtgatgggtatatgagtgttcactataaaattatttcaactcaggctgggcgtggtggctcacatctgcaatctcagcattttgggaggccgaggagggaggatcagttgagcccaggagttcaagaccagccgggcaacatagcgagaccccatctctaataaacttttatataaatatatatatagatatatatataatacacacacacacacacatatatatataattatttcaacttggctgcatgtttgaaatgtttcatagtaaatgttagggagtggggaagcaggactcttctggcggcaacaaacagccccaccaggtgccaccatttctatctagcacatcaccttatttatttcccttatagtatttatcactctctttatttttattttaaaaggaaaaaagagatgaggtcttgctgtgttgcccaggttggtctcgaactcctgggctcaagccatcctcctgccttggcctcccaaagtgctgggattacaggcgtgaaccactgcgcctggctcttgtcaccctcttattttgtttacttgtttacctatttattgttatttatttactgtctagtcattgaaatataagcctcccaagggaagtggcacggacaccaacatcttccagtgcccagaatagtgactgccacccaggaactcagtaaacgtgcttttcttaaagacagggtctccctctgtcacccaggctggagtgcagtggcgtgatcatggctcactgcagcctcgacctccccaggctcaggtgatcctcccacttcagcctcccaactacaggcacgcacccccacacccagctaattttttattttttgtagagaagcggtctcattatgttgtccaggctggtcgcacactctcggcctctaagatttccagcctcggccccccaaaatgtagggattacaaggtgtgagccactgcacctagacaacatgtgttctttttattttatttttatttatttatgtatttatttattttggagacggagttttgctcttgttgtccaggctggagtgcaatggagcgatctcggctcactgcaacctctgcctctccggctcaagtgaattctccggcctcagcctcccgagtagctgggattacaggcacgtaccaccacgcccagctatttttttgtatttttagtagagatggggtttcaccatgttgaccaggctggtctcgaactcctgaccttaggtgatcctctgggattacaggcgtgagccaccgtgcctggcccaacatgtgttctcaaatgcgtcttgggagaggactggggatctagtctggctccagactcagttcagggaccacaggaaggaataaataacgacctcttagcccaggttccctagaagaaaagggtatacccagcagctggagaatgtcccataaggtaagggaatgtgtgagttggcctgaaaaacgggcaacaggttgaactagacatcttaattgtttccctggagccctaattcctgccccaaacctaatacagaccctctaccaatcccattcttctggccccgccccaagcctaggccccacccccagactcttaggccctgccccaaagcaaaaactccagcccttttaaagctaagcaatgcccattccggccctttcaaggttaggaagtcccccaagtctagggcaccgactcaaaacttagggagcttggatctgtgggcgtttataggataggttggtggaactagaggaggcggtccccagtttgtactgcctctccagggaatctccccaaacccgaagacacgtcccattgtgctgactcctcattggatagtgcagtctgttctggcctctctgattggtccttccacaatccctagctgtactccctctgcattggactgcgcctgtgagccaccctttctgattggcccctgctttcccatgctttgctcctgatcgggcaagtccttgtgcatggctctttctgattggaccgtttgtaatcacaagcctggatgaaacagaagttccactatggagggtgggagtaccaccaaggaggacgaggaggaggggggggagggggagggggagagggaaggggaggggagggggaggggagcggggaggaggaggaggttccctaagtctcttgcctaagagagagtgtggccattgacccccaagatagcctgggcttaaagagttctaactgtacagaccacaggtgcctttggcttctatgcctcagatttttatcgtctttaagttggagagaataatagtacctttttcacgaggtattgcaataattaaataagctaatgcctataaactgcttatagaagtacctggtacataggaagccctcaagaggagggtcagctattagtattcatttgatcatgtaagtgcatgaccttggatgagtccctctgcctctctgacctctgcaggccaggagttccttgtccatttaattgaatgacccctcttgtctccagtcctcctcctcctccatctcctgccttcagggactgggcctgtgatcagagggagggacagagagatagggacaggaaaacagcactagtggagggcagaggagctcaacctaaccctccagagaatttagggcagggtgaattttctctatggaccagtgtagagtgattctatcccgaatccctcatgcaaaggacttgccctgattgggggtgagcgggcaagagatagggtagagtggggtggtaaggggatggtgtgttaaggctgggagggcttggagctgggctttttggaccctatccccggaaacaccaaggttgggggaacgggcagcccaggcccaaggtcactatgtctttgttaccatggcaacagccacctctctaccgggaacctgaaaaggggtggggggagggagttcccacgtccctgaaaccggggacagagaggggaacaattagaaacatggaagagaagcagagagacagaaagggtgtgattcatctctgtgaagacctgcccatctcggaattctcagagcccggtacattgtgggtacttaatcaatgtccctcagagacagacgcagaaagcctgagaaagttcgatgtcaagagatgccagaaaaaagaaaagaagaatcttcagatgggggcaagtgtcccttccctgtctcctcaatctcacacccctgggagtccaccgagggcccaggatcgacttcagcttccccagccctgggtgttcaggcctacctgaccgtacaaaccatccaccccccagcagctcctgagatcctgaagcaattacgttcaaacctcttcggcctttaaattcttcctatctaagggctcagctgagaaaagtcgcattcggtgatgcctcctaccccccagaggtggggagtgggggaggaaacgggcactttgcctcctttattctcaggggtccttgttccccttgggagtgaccgctctgtagatccagatatttccccaatacctccaggagacccaggcctcgcccatccgtcccccaccccccaaggaaatccttcaggcccttccctttctttctaagaaagaggtatcctccttccctcccgggacccagctcgcattcctctaggtcagcccgccccctgctggcccaagcctcgtactgcaggaaccgtcggctagagcccagaagaggcagaaactgagtccaaactgaggatctccgagtttttgcattttaaaatttatttaaagtcttggttgttcaggtcctaggggttccaagtccccagtcaccttgaggactcagacatcaggaattcagtccccagcccagagatcaacgaaagaaagacaacttttcttggagccaggcctcagtgaggtcatcagtggtgcggatttcgaacacctgggcagagagaggtctcggcattatgatctactcaaacactgagacagtggctgggcacggtggctcacctgtaagagagcactttgggaggctgaggtgggtggatcacttaaggtcaggagttcgagaccagcctggccaatatggtgaaaccctgactctactaaaaatacaaaaagtagccaggtgtggtggcgtgtgcctgtcgtcccactacttgggaggctgaggcaggagaattgcttgaacccaggaggaggaggttgcagtgagccgaggttgtgccactgcactccagcctggatgacagagcgagacccagttctttaaaaaaacaaaaacaaaaacaaaaaccactgagacagtgaggactctagtccctcttccctcagacccaggacccacaccacctctccctaacactctggagccccatcccagtctgaacctttgtgagctctgctgtctgcaccagcctgtttttactccctgcatacatcatctgttgttccggcttgcagcctgcgtggaaaagaggagaaaggcacatcagtggggacccaggcgtgttctctaaagctctagtaatgtcctgaaggccctgcagcttgccaagggtcctaggagctcttctaaggaggtccctgcactgtactcagtttctaggttggcttgggggcttcaagttattctgagggtctctggagatgatttaggggccagacggggatttctaggtgaaaggaaaaggtgggttggcttaggccccaggactgagaacgggtgggctcttggtgaatctgagcccccacctccacttcactgccctcccacatcatgcgtgcgacacacacacatcctcacccagtcacacacaggctgtcacatgctcacactcttacacaagtgcctgcacacattcgcatttacacacaaacacacacacacagaatcgaagaccctctcctgaggacagtagagctgtgtctcacccacagggctggagaagatgaaacacaaagggtaggacactcggccatcgtcatgcacgtacttgtagctgtaaaccacgaacctaccgtgaaagggaattgaaaatcaggactctggcctgcagcccaggcttaacagccattacctgagtccacagccttgaaatgttggctgagtctgagaacccagggttgatgtctgggactcagggtactgacctcaaacacaacaaatgattaaaaaataatcatagggccgggcgcaggactcacacctataatcccagcactttgggaggccgaggcgggtggatcacctgagatcaggagttcgagaccagcctggccaacatggtgaaacctcgtctctactaaaaatacaaaaattagcctggagtagtggtgggcgcctgtaatcccagctagtcaggaggctgaggcaggagaatcgcttgaactcaggaggcagaggttgcagtgagccaagatcacgccattgcactccagcgtgggtgacaaaagtggaactccatctcaaataataataataatgatagtgctcatttgactcacaattactttataatataggtgctattaatatccccatcgtacagatgagaaaactgaggcccaaagtcacttgcctaaggttctacagataggggagagatttgaacctgggaaagtgaatgccagcgtgtaagttctcaccccctatgcaattctgtccagtgcacttgaaccccaggtgcactgtgaccagtgatggctacagaatcatccaagcccggtataaaatgaaaatgtggggcatcttgttcaagaagcaggaaaattgttttcctttcttttgtagtctctctctagactgatcatcgtcttttttttttactgttattagagacagggcctcactctgttgcccaggctggagtgcaatggtgcgatcctagctcactgcagtcttgaactcctgggctcaagcaatcctcctatctcagcctccagagtagctgggagtataggtgcacaccaccatgcccagctaatttttttttttttttttttgagacagggtctcactttgtcacccaggttggagtacagggacgtggtctcagctcattgcagcctcgacctcccaggttcaggtgatcctcctgcctcagccccccaagtagctgagattacaggggcgtgccaccacatccagctaatgttttttgtgttttttgcagagacagagtttcaccatgttgcccaggctggtctcgaactcctgagctcaagtgatctgtccacctcagcctcccaaagtgctgggattacaggcatgagccactgcgcctggcctttttttaaaaaattttagtagaaatgggggtcttgttatgttgcccaggctggtcttgaactcctggccacaagcagtactcccacctcagactcccaaagtgctgagattacaggtgtgagccactgcgctcagcctgtcttttttagtttgctatttaaagtcgtgctccctcgggcatgaggatatgcgcaggcagagtgcagatgctcacaggaacaccctgtaacttgtcaggcaaggggtgccttctggaccctgaccctccctacaccagcaggaaacccaaggacagcagcggtcactgggtgggtgcagagagtgggtggctgagaacctgttcagggaggcagccaggtggtggactgcctgtgaacctagctccaaaccccagcacatttgtgtgaagtccattgtcccatctgacttcatacaaaacagaaattcaaagataaaactataaagaaggtgaccgttaacccccatgtgtgaggccccctcctgggtgcggggccctgtgcaattatcatatgcccatgaagctggtccttgttgagtcctacagcctctaatcctagagacccaaaatgaattcagtcaagatgaaaaatcttagcagaccagttttcacagaaatagtcaaagagctcttccaccaaaaaaagcaccaggctcatgtgacttcgcccaggattctacctgatagttaaaagtcgagtcattcctttagcagggtgcagtggcagtgcctgtagtcccagttacttgggaggctgaggcaggaggatggcttgagcccaggagttagaggctacagtgagccaggatcacagcactgcccaatagcctgggtgacacagtgagaccctgtctctaaaaatttttttaataaaataacaataataataattaatttgtttgctacctaaagtgttcccaaacattgaaaaagaaggaaaatttctttttttgtttttttgagacagggtcttgctctgtcacccaggctggagtacaggggtgctatcttggctcacttgcagcctcagcttcctgaactcaactgacccccgacatcagcctcccaagtagctggaaccacaggcacatgccaccatgcctggctaattttttttttttttaatagagacaaggtcctccaccaggcgcggtggctcacgcctgtaatcccagcactttgggaggccgaagcagggatcacctgaggttaggagttcgagaccagcctggccaacatgtctctactaaaaatacaaaaattatccagacatggtggtgggcccctgtaatcccagctactcaggaggctgaggccagagaatcgcttgaacccaggaggcggaggttgcagtgagtcaagatcgcgccactgcactccaacctgggcaacagagcgagactctgtctctaacaaaaaaaaaaaaaaaatagagacaaggtcttgctatgttgcccaggctagtctcgaactcctggcctcaggtgatcctcccgcctcaggctcccaaagggctgagattacaggtgggagtcatagtacctggccaaaatttcatttttaaaaaatgatgccagcgtaatgttgaaacaaaaactcaacaaagtttgtacaaaaaaaaaaaaaagactcttaaaccggtatcataaataatcggtataaaattctgcaataaaatattgctatacaaacaaaaagttctagagtatgaactcttggcctcaaacacagagattcttttttttttttttttttttgagatagagtctcgctgtgtcacccaggctggagtgcagtggtgtgatctcagctcactgcagcctctgcctgccaggttcaagcgattctcgtgcctcagcctcccaagtagctgggattacagtcacatgccaccacgcccagttaatttttgtatttttagtagagacgggatttcaccatgttggtcaggctagtcttgaactcctgacctcaagtgatccaccctccttgacctcccaaagtgctgggattacagggatgagccacctcactcggccaaacacagagattcaaagtccatgaatagggctggaactccagcagtcccttagcctatacctccaacatcacccctcccctcatggcctgatccaaccctttcttcccccaggatacctgggctgtctctccggcaactccattttgagctcctctggggaaatgttctgaggcaagaaaacagaagaaaagacaaagaatgaggcagggcgcagtggctcacacctgtaatcccagcactttgggaggccgaggcaggcggatcacaaggtcaggaaatcattcagaccatcctggctaacagggtgaaacccgtctctactaaaaatacagaaaattagccaggcatggtggcatgcacctgtagtcccagctactcgagaggctgaggcaggagaattgcttgaatccgggatgcagaggttgcagtgagccgagatcgcgccactgcactccagcctgggagacagagtgagactccatttccaacaaaaaaattagccaggcgtgttcaggaggctgaggcaggagaattgcttgaacccgggaggcggaggttgcagtgaatcaagattgtgccatagcactccagcctgagcaaaaaagatcgaaactccgtctcaaaaaaaaaaaaaaaaaaaagaatgaccacctttaggtgagcacttaccatgtgccaaggcatcgttctatgaaacacacatggattaattcatgcaactatcccgtaagtctgtggggtaggtcccatcattatgcccactatacagctgagaaaactgaggcccagaggtgttaaggcatttgcccaagattgcacagatagaaagcagcagagttgagatttgaatctgggttcgaatcataactgcttcactatactgcctttcagagggcctgagagagccccagcccccagtctccatggattcccttataaatccttatcgcaacactagagaaataagccttattatcattcttgttattgataaagacagtgaggccaccaggggggtgaggtctacccccttttttttttttgtagagatggagtctttttttttttttttttttttttgagacagagtctgtcgcccaggctggagtgcagtggcacgatcttggctcactgcaagctccgcctccggggttcacgccattctcctgcctcagcctcccgagtagctgggactacaggcacccgccaccacacccagctaattttttgaatttttagtagagacggggtttcaccatgttagccaggatggtctcgatctcctgaccttgtgatccgcccgcctcagcctcccaaagtgctgagattacaggcgtgagccacggcacccagccgagatggggtcttgctttgttgcccaggttggtctcaaaactcccagcctcaagcaaccctcccacctcagcctcctgtgtagctgagatcacaggtgcacaccactgtgcttggctaatttttgtatttttagtagagttagggtgttaccatgttgcccaggctggtcttaaactcctgggctcaagtgatcctcctgcctcagcctcccaaagcgctgggattacaggcatgagccaccatgcctggctagctttttaacttatatggaaactctttcatttaaatgccaataaagcattattatcatcattattaagatcatcatcaccttattgagcacatactaagtgccaggccttgttctaaacccattacaagaattaaatcactggatgtaaaaacaagcctatgagataagtactattctccccatttcacagatgaggaaatagagacacaaacaggcaaagtctcttgctgggggtcatgagtgagctagaacttgatctccagggttttttgtttttttgttttttgtttttgtttttgagacagagtcttgctctgtggttcagactgaagtgtagtggcacaatctcggctcactacagcctccatctcccgggttccagcgattctcctgcctcggcctcccaagtagctgtgattacaggtgcccaccaccatgcctagctaactttttatatttttagtacagatggggtttcaccatgtttgccaggctggtcttgaactcccaacctcaggtgatccacctgcctcggcctcccaaagtgctgggattacaggcatgagccactgtgctcggccaatctccaggtctttctacccccatgccaggctcttcatatcagttccaaccacttggttctcccagtctcaccctgtacctcccagtcccaatcaccccagcccatcacctgaaattcttcctccagcaccaccatctgccggtctttgtccaccttcactggggaggggtggcacacagggattagacactccccctgatccatgggggacacaagcccagccctccctatctgccctcaccaccgccctcccatccttctgtgggggaagatgtcactcacttatgatggctgcattgtctgtctcttttcggaagcggaatttcctcagcttttctgttagctctgggtctacctcgcacaccaccagggagtcagactgccggagggacccaggaagagctgaaatggcctggcctcagccctcaccccttccccaaacctgtttctccatccactaatgaagaggagcatcgcgccggcccatctgatgcctttgtgaacattgagaaaaggcacccttcccacagagtagatacccctcaccagggcactcagcttggggggcggagcagaggctgggttcccgccttctccacggggactcttgggggacactcaaggaggtgcagagatccacttcctgagcctaaacccagagccactgtctctctgttcttccagccgggctgttcaccacagttgggcccccttcccggcccgtgacctccatcccatagcctgaccttcgcccaggtgtcctccaagccccagccccaaccccagccccagctcttcccatagaacccctggcccctgaccatgattgttctgtccacaggcctcttcttttcttagttccgctgtcttctaggcgtggggaccggggctgtaggggggcgggctgtgcagtaggaggaaggtttcatccaacaccacatcctgtttatgccctttctgggacaactgtcacagagggctcctccccctccttccttcccctcatctgccaggacctgtcaggaaatcgctcagaccagggttccaaagcttccttgctgtgtgaccctagctaagtaacttcacccctctgatttgagattgtggtgaggatataaatagcttcacatcggccgggcatggtggctcacacctgtaatgccagcactttgggaggccgaggcgggcggatcacctgaggtcaggagttggagaccagcctgaccaacatggcaaaaccccatctctactaaaaatacaaaatattagcctggcatggtggtgcacgcctgtgatcccagctactcgggagtctgaggcacaagaattgcttgaatccgagcagcagaggttgcagtgagccaagatcacatcattgcactctatcccaggcaataaaaatacaaataaataaaaataaataaataaatagcttcacatagctgccagcatggcagacacaataggtactaaaaacgaactattttgctcctcccctcctccaggtggccttcctagatttacccccatctgggatatttgaattgcagggctggaaaaggggagtttagtcttttgctggtcagactgacgcccattatgtcaatggcaaaatggggaccagaggggcaaccccacagtgcctgggtaatggtgacttttttcctgcacttttccaacctcactagccttgcaatgacctatgaggccctacaacaagggagttcaatcccgtcagaccggtacccaattttttttttttgagacagggtctcactctgtcgcccaggctggagtgcagtggtgcgatctcagctcactgcaacctccgcctcccaggttcaagccattctccggcctcagcctcccaagtagctgggactacaggcacgtgccactacgcccggctaatttttgtatttttagtagagatggggtttcaccatgttggccatgttggtctcgaactcctgacctcaaatgatccacctgcctcagcctccgaaagtgctgggattccaggtgtgagccactgtgagccaccatgcccggctattttttttattgagtatttttgcactgcccccttttcccatcccgaaataaaattcctagataatataacctacttacacacataaattcaaaaaaaaatcaatataatgtcctgactgtcatataaagaagaaataaaaggaatgtagttcacacaaaaaccatatgtatttcagtgagaagataaaagcaaacaaaagacaatttccacagggtcctaggccaactgtgactggcccacttccctccatggtgggcaaaccccggaccctacactggactctaccccttcacctacatctctgcagctgtcctctctctccctcttgtctcaccaacgtccccatgcctcctggatctttctccttagcctccatgcagtgttacttcttccatcttaatttttttcttttctttttttcttttattttgagacagggtctcattctgttacccaggctggagtgcagcggtgtaatcatggctcactgcagtctccaactcctgggctcaagccaccttcccaccttggcctcctaggtagctgggactataggcacgcaacaccatgcctggccaattttacttttgatttttatagagacaggatctcgctatgtggcccaggctggcctcaaactcctggcctcaagcgatcctcctgcctcagcctcctggtgtgcagggattacaggcgtgagtcactgtgtctggcctcttccatcttaaaaacataaaactgtatctcctgtccagctgctgctcactcatttccttcccttttctgcaagatttctcaaaagaggccgggcgtggtggctcatgcctgtaatcccagcactttgggaggccaaggcgggtggatcacgaggtcaggagatcgagaccatcctggctaacaaggtgaaaccccgtctctactaaaaatacaaaaaattagccgggcgtggtggcaggtgcctgtagtcccagttactcaggaggatgaggcaggagaatggcgtgaacccaggaggcggagcttgcagtgagccaagattgcgccactgcactctagcctgggtgacagagtgagactccttctcaaaaaaaaaaaaaagatttctcaaaagaataatctacattgctgcctccaatttctcctcccagttttctcttctgccttctccaatcagcctttcacctgtattcctctcagctgacatgcccttgtcaaggtcacccatgcactccacggtgctggatctaatggtcaattctcactcctcctcagccacatctgacacagcccatcactccctgttccctgaaacatcgtcttcatgacaccacacttgcctggttttctttttttcttttctttttttttttttttgagacaggggtctcgctctgtcacccaggctggagtacagtggcaccatctcagctcaccgcaacctccgcctcctgggttcaagcgattctctcacttcagcctcccaagtagctgggattacaggcgtgagccaccacacccggctaatttttttttttttttcttgagatggagtgtctctctgtcacccaggctggagtgcagtggcacaatctcggctcactgcaacctccacctcccaggttcaagcagttctcctgcctcagcctcatgagtagctgggattacaggtgtgcgccaccacaaccagctaatttttgtatttctagtagagacggggtttcaccatgttggtcaggctagtctcgaactcctgacctcgtgatcagcccacctcagcttcccaaagtgctgggattacaggtgtgagccaccgcgcctagccatatttttgtatttttagtagagacagggttttaccatgttggccaggctggtctcaaaccctcccatgggccagacacagtggctcatgcctgtaatcccagcactttgggaggccaaggcaggagaattgcttgagaccaggagttcaagaccagcctgggcaacatagcaagaccttgtctctacaaaaaaattttaaaagtagccgggcatggtggcatgtgtctgtaatcccaggtaccagctacttgggaggctgaggttgggaggatcacttgagcccaggagtttgaggctgcagtgagctaggatcacaccactgcactccagcccaggtgacagagtaagatcctatctctaaaaaccaaacagcaggccaggcgcagtggctcacgcctgtaatcccaacactttgggaggccgaggcaggcagatcacttgagtccaggagttcaagaccagcctgggcaacatggtgaaaccccatctctactaaaaatacaaaacttagccaggtttgatggcatacggctgtagttccagctactccagaggctgaggcaggagaatcacttgaacccaggaggcaggggttgcagtgagccgaggttgcagtgagccgcgatcgcaccactacaatccagtctgggcaacagagtgagaccctgccccccccccccacacacacacacacacacacacacacacacaccaacaatgactaaaatactaagttatctgtcaccacccctaccccattgcctcttggaccttgtccttcactgccctcttttgctcactccactccagcaatgctggcccctttgtggttctgtgaatgatcctactacatggcctttgcacttgctgttttctctttctggaacccactttctccttcattccttcagatttctgtttcagtctcacctaatgaaagaggcctttccccatgtaaattaattctggctgcattactccattcccttagctgctttcttgttatttatttgtttatttatttagagacatagtctcgctctgtcacctgggctagagtgcaatggcaaatctcggcttattgcaacctccgactcctgggttcaagtgattctcctgcctcaccctcctgagtagctggaactacaggcacgcatcactatgcccagttaatttttggcatttttagtagagacagggttttgccactttggccaggctggtctcaaactcctggcctcaagtgatccaccagcctcagcctcccaaagtgctgggattacaggcatgagtcaccatgcccagccactgctttctttttctccttggtacttatcacgaagttacactgtatttccttattgtttgtgtccccaagaactagaatgtaagtctttttgttttttttttgttttttttttgagacggagtttcactgttgttgcccaggctggagtgcaatggcacgatcttggctcactgcaacctccgccacccgggttcaagcgattctcttgcctcagcctcccaagtagctgggactacaggcatgtgccaccacgccccgctaattttgtatttttagtagagatgggatttcaccatgttggtcaggctggtctcgaacacctgcctcggcctcccaaaatgctgggattacaggtgtgagccaccgcgctcatcctattgttgtgtttctagcaccttaagcagagcctggcacatattagatagtcaagaaatattattgaatgaattaatgaaccagcagttaatgagcacaataattctatgcagtgtgaaggctgttgcttaaatgcaggaggtagtggatggggtttgtgacatggccccaccctggtgaaacagcctttcctcaaagcgtctataatgccacactctcctggttttcctctctctggctgccttttgcaatattcatcgacagcgtcaattcctttgctcaaatcctgcctctctgtttcagggttctgttcagtccctgtctccagtgacccttcataccctccccgggctagacccctaactcccacagcctcaattaccatctttgacgatccttaaatcttggtctccagcctcaatttctcccttaagctccagacccagggtttgtgcacctcctggacctcgctactaggcatccacattgggcttagtatcttcccaacctgcttctggcgcccagtctcccggctagaggggcctggtcctaaacttttctcccccttccactccatagccagccagtgtcagggcccgttcgctctgcctccagggcgtccctcccacctgcacctccttccctccccacagtccctccctcgtgcaaaccccctctttcttccccaccccctcccccagctgcctccctggactcccgatcccgtttcattccctccaatccgccctccatgtataagccagagagacatctctccaaaaccccagactcaccatgatcctccccggcttgaagcccttcacggctccctagtgccctcgggacaagtccaaactccctcaagtggccaaacaactggcctctgctcgttcctcacccctccctgtcttcaactcgaccctccatcccgactgcctctctaagtgcctgtaacaagccagatctctgtcaccgagagccttctgaacacaggtccctctgattagttcacccggacccaatacagtttgtggaacgcacagatcacaaccaaagtcacagcaacaactcccgtttattgacagcctccttgatccttagcgctttctgtgcattctcttcccaccctaaaggctagatctcgcctcgccattcccatcggagagagcaagcggcaaggctgagaacagcgcgatgagaaagccgagcgcccagaagcccgagtgcagacgcccactgaggacagccttgggtgaggcgggccacccaaggggcggggaagaggaggcctggaacgcctgaatcaggaactgtgacttcgctcggggcagctggggtggacgcgcgcgagcctgccccctgcgggcctggaggcccaacctcagactccgccgggcccgttgccctgggcaacgccccgcgcgccccgccccttccccgccccccagccccaaaccccaggcctggccgactgcccgtcacccccacgtccgaccaatcccgccgaggagggggcgggcctcttgggccccgttccaccaccgtcgctcccccctcgccgcgaccccgccttactcggctcacacctcccgcccttcgggctgccctcgccgcccgttggctggcgcgccgttcgtcacccgggcgtgagctaatgccggcgcgcggcggcccccgtcggggcggggccaggggcggtgacgcacggcgcggtgacgcagcgcgacggcggcggcggcggcggcggcggtggtcggtgcgggaggagggaggggagcttgcgggcccgagagggggcgacggcggcggcggtggcctgaggaggcccgagcggcggcggtggcggcgaaggccgaggcggtgagtctcgggccgggccggcgcggggcggcggcgagtcggggcgcgcggggctcccctcagggcgacccaggccgcgcgggcggccccgccccctcagggaccccgaaccgcgggcggcggcggcgggcgggtgcggaacgcgggcctcggggggccgggccccacgggagaagccccgcgcccgtccccagtctccctcctgggccctggccgaagcttccctccgaaatctttctcatgccctcgggattgccgaggggccgggccgggggcctctcctcaggaccccccgcacatccccctcggagagccccggaaagcctgccgatcccccgtgtgcgccctgaaaggtccccgcaaaacccacccctcccgtggagtcgcctcctcgagcccttcatgggtcccagcagctttcctcgcagacccccgccctttggccccgaagcccccgtcctcctcctgtctccagaaatagtcctcggaggccactcctcgtccattccacagcgtggctctcatagctgctccaggagcctccctcacgagccctgcacacctccccaaggctccctccggacccctgtccattccagaactctcccccggagccctgcctctcacagcccaacaggctcacccgacttccccctcccggatcctaagaattttccctcccacttaccccattccagaaacctccttggagattttccgctcataccccctgcatttctgattccccctcccagaagtccttcagaatgcccccgacggaccgtgatcatcttccctgaagatctccttcccatatccccaaaataaatcttcctcacagactttgtgaaatgcccccagatcccaaaaactcacctagaagactccatccccctccccaccgtattgcaaccatctctcatacacactcccccttcacgtatccctctggacctttccacagatcccaaaagtctcccccagaggcctcctgtctccccctggtctcaccaccctaaaatgccctagagatcaccctcatgtagcccagtgatcttcaccgggatccccttccccacccccactcattctaaaaatctccagcaattgcctgaaatctccagaggactctcagcatcatattccaaaagcttcttccaaaatcccttttacatactccacatcttttccagtcccccacatcacacgctccaaaaattgtttaaggatcctgaaaactttcctcatggtttttctctcagatcccgtagaactccccttcactaacacctcagaatccccccttgcagaccggttttagaggaattttctgaagatcctcctcacaacccctgtaagaccgtaagattctcttggtgacccctctgatatgcaggttttcaggaccccccccccccacacacacacacagcttagagaccccagcgaccccctggagccctcctgacgtatgttcttgaaatccctccaagaccttcctgacaccaccagaaccccttgaatcaatacttctgccttactaagggacttttctagagatatccctccctgaacttgctcacacaggtcccctaaatcctctagaatcccttgaagaagaccctcacacacacctaattttcccccaaaataacccgagctcttgctctgagaaagtcctataattctttctgaaaaaccctctcctctgacactctctcagaagaccccgccttccccatatactcttttggagactttactcagctttctcctcaactgagatctctgaagagtttttcctaaaaacatccctctgtcatcccactccaggaccagtctcagaagaccacaccttcctcagacactttttagagaattttctcccaaattgccctccatcagccacccactcccagcgcttcctgagacttcctcagaactttccctcagattccacttctgacatccccaagaaacattatttaggaccctatcagatttacccactaactttagaattgctatttacaccctctcatttccccattctctttcctctgaagtcaactcagagacctttctcagggggcccccttttcccattatcccttcagaggtccccaacattctccagactcgttgcccaagagcctctatgtttccttgtaaagattcttgagagacacctttccccgcccccttgaaatcccagtgctccgagatctttctttcagaccatttttcttaggtgccatgctcatagacccctcttcccttcagagatcaagagacccttaacaccctccttagagacttaggattctccccatttccctttcagaagccttcttccttctcccctttgaggacctcctcaccaaataatcccttcccctatagcagtggttctcagtgtggttcctggcccagcagcagccacatttgttagaaatacacattcttgaatcccactcagatctactgaaactgaaaacctgggagcagggcccagcaatcaagagtttttaacaaaccctcctggtcattttgatgcacacgcaagtttgagaacctgtgccctttaggaggatttccttttcctcactaaaagccccctgaaagatgcctcagggtatgcctctgtgccctactgcccactgctgctttcctgtttcctaggaatcccctttatgaagtacccatcctccagaaagatttcttacctaccttgaaaggatcttggcttctccacaaggttactccatcctctgagcagttatttccgattctacttttgaatggtttcttttcagatcttcctcagtgctttctctttctggctacccctccagcccactaccagcctttggtgcttctttaaattgctgcttctttgaacacacatatccatctcttcttgtccatctgtttcttcacataggcaccctccccttgaggcaccctcaggaggtcttttcattctgtgtcttactgccaagacccctccacctccattgtacctcttagaacaccactcaccttcaaccttgtagattttaatgtacttgtccactcaccctcactggactaggaactctgaaagtacgggatgtgtcttgttcttctctgaatcccacaaggtgggatctactctttgtaagttattggaaatcactggagaataagcagctcttccttctgcatttggccagaaatctccaagttcctcagatctcactcctcattcaggtttagtacaccttccctgccccctcctctcctctcacctcccttttttttctccacacagcaccctttgcctttactcctgccctacttgctcctgtcttagggactttctttgtgctgtttcctgattctgagctaccccaagtcctttgcctggtgacctgcctcacccgtcctggttggcttctcttagcagcccctctcagctgctaagtctggagcctccacagagctcttggcattttttcaagggattctgtttctagggcccagaaggggaaacagagaccccagggtaaatattggggcctgccttcagggagctcacaataccagtagggggcttgggcatgtacagagcagaaaatgaggtacaaattatatgctgtagaaattcagcagtgagagggagccttttatttggaaagacttcacagaaaaggtggtatttgggctggatagtgttccatgggagttgggacaatgatggtgcccccaggcagaggaaacagcttaagcaatgggtcaaagacaaagcctcctcatctctcacccatggtatctcttctcttcacccaaaagatagagatgaaagaagacagatttcctccatttgcattgtatttgccagctgcactttagtgacctacagagtaataataataatgaccactggtttttgaatgctttctaactgccaggcactgtttaagtgctttacatgtattcataggaggtaggagtttacctaccctatgaggtaagtaaactaccattatcctcattttgcatatgatgagattaagaacaggtaggactaatagagggtctgtgggcactgtccattccaagatggtagtgccttgggtcaaaaagtttgatttttagttaagataggtttggctgcaatggggcagtagttgttaggtatgcagaccctgggtctggacaggatttgtatcccacattaccactcaccagttttgtaccctaggacgagttacttccctggtcttttagtttccacagctaaaaatatgaaggaaataatgatactttacttcatagaattgttacgaggattaaataagttaatacatgtaaagtacttagaacaatgtcttgcccataattgcaatgttagaaaaacaataaaataaaaaaaaagctcatatcagccagaactctaaaaacataaagtgatagaaccttagctcaaagtggtttaatgaaaaaagtgggggattaattggcttttgttactggaaagtccagagctaggttggcttcagacctagctgcatccaggtgttcaaataattttctcagtcatctcctcccatttctccactgagttagcttcatcctcaacaagcttctgctttggatgacaaatatggtcctcagcagccccaggttttaaccctacctccttggaaagccttagtggaaagagaactctttcttgagagtcccagtttgaaaatagtttcttccttgaatagatgtgagattatgccagaagatccttagaaacatattttgggttctgtaccctgcaactcagtctctggcttgctgagccaaataggcctgtgattccatccgatgaactttctgagcagtgatggcaatctccctccccactgtcccccagccgcagtcattctctgctctgtgattgtttgggtctagagagagcttgtggctggtctgactcaaccacactttgctttgggatatcacgggtgatatgaggtgatcagcctggcttgatggtggcctcaggggagcagaatccaggagtaatggcaataccctcaccacagtttaaggtttccaagacacagaactttggaagagagttaagtaggattgctgtgagtggagttttgttttgtttgttttagtgtaaacttgttgaatagaagcgggttcagggcaagttacagaacagcagtgtatggagtatgcaagtctcaaatatctccagcctgcactcattcattaatgcatggaggcactattctaggtactggagacagagcagtgaataaaacattcaaggtcctgaaattcatggaatttatattctgatggggggaggaaacaaaaaaatcagagtgtgattcatgctgtgaaggaaataaaacagtgtgaaagagagggtgggagtggccactgtagtagacagggggatcagaagaggcctcttttgggaggtgacagttgagcctgataaccagaaagatgagaaggcaccagttgtgggaagatctgggagtggaacattctaatctaagcattgttacatgcagaaaaaggacctctgcaaggtggggaaatttatcacagatatttattgagggcctgctatgtaccaggtgctatgctaggaattggagatgtagcaatgaataatatagctacagtcttcccttctctcatggatcttacagtctaggtgtttttggaagagctgcagcctttgaagaaacatctcttgatgatgatatcatagactccttcctactgggcagatgaggcagaatggggcacaggtgagcccagatctgattgatgagaaggaaccaaccttgtgacggtccggggaagagcatttcaggcagagaggtcagcaggtgcaaaagccctgccatatgttcagggaatcgcaaggaccagtgtggctaaagcctaagtgagggagaggggtgagggttggaaaggctgacagaagccagattacttgcagcctaagggccacagtaaggagtttctattttcatttaaggggattgggaaactattagaagggagtttttaaaagcaagacagcgacatgatctgattaatttttttagaaagctcactttggtttctgggaggaaaacagagggtcaggacagaatcaggaaggaaagttaggagacaatccatttgtccagatgagaaatggtgacatgaatgtggtggtggtggtggtagtgaagatgtagagaagcagatatattttgggtgtacagaaaacaggacttgatgatgggattagagaaagagaggaatctagaataatgataatagccaagtcatttatgcctcacaactctatgagagtaggcactattattattttctgtcttccttctcagtaggtactattattacacccacattacagatgacaaaacaggcatggcaaggtgaaatcacttgcccaaaattacacaggtagtaagtggcaggcttatatttccaacccggcagtctggttctagagccacttaggtttggggaaagataagcaaggcatgtgtagctgacattaagaaaaaagaaatatcaagacctaatgactgggtctttgggaaatggaagaagtcaaagatgactcaaaaaaatgtctcagttgtccacagagaggtgatgattgaatctacaggagttaattacatgcctaagtgagagaaaacaagtgtaaagaagggaaaggaagcagagaataaacttttcggggggaaggggtgtcaagacatttaggagtgggaggaagaatgctagcttcctctctattccagagtttaccggagctccccatactgtacttatcttccaggaggccctgcctggcttctcctctcctctccctcccttccccagcaccattcatacaaaaagctcattctttgctaatgcagtggtgtacatgttttgtgtacgtatttcaggagtttctggaaataatggttgattcttataagagaagttgtgctcccttggcttctgacagtctcttctcaggttatgaaagtgagttaaccctaggtaactagcctgttaccttgttcatgaagtgtaagttctcaaaggcctaggtcgtgctgtaaaaagaactaggaatgggtaagaaggcagataggatccccttattcatccagagatgttggtattaaagggcccttaggcccaactttcaccttgttgcccaggctggtctcaaactcctgggctcaagcgatctgcccacctcagtctcccgaagtgctgggattacagatgtgagccaccatgcccagctttcttgcattgttaagagcaagcaagagctctgaagccagactgcctggccttgaaaatctcagcttggtgtacagtcttgggcaaagtgacttaacttctctgtgcctcagttgctccatctgtaaaatgataatatattcatatatgtatgttatatatttttgaaatagagttttggggatcaaatgtgcttatctgtggaaagctgttggcaaagggcctgacaatgtatgatgtatgaagacatgctaagcatcatgcttgctattgaaatgaagtatagaggaggaaaaaagcatcatgcgcggtatttttaaatacattgtttcatttaattcttctaacaagcttcattgaggaagaaacagagttacttgtcatagtcaatacagcaagtaagtataacaggagagccaggatttaagccaggtctgactaactccaccatcctgcttctgaatgaagagagctggactccagaggcactgtttatgggcatatgggccttttctcactgtttggggccagagaagaagcccagagggcagtttgtcctggaacatctcagcatttttttgtttttgtttttgtttttgttttgagacaaagtctccagtcccccaggctggagtgcagtggcgcaatctcagctcactgcaacctccacctcccaggttgaagcgattctgctgcctcagcctcctgagtagctgggattacaggcgcctgccaccacgcccagctgattttttgtatttttagtagagacagggtttcaccgtgttggccaggctggtctcgaactcctgacctcaggtgatccgcccgtctcggccccccaaagtgctgggattacaggcgtgagccaccgtgcccagcctttctccaggtgggagtgcagtggcatgatctcagctcactgaagcctcgacctccagaactcaagtgatcctcccaaagtagctgggactgcaggtgcacaccaccacgcccagctaatttttggattttttgtagaaacggttttgccatgttgcccaggctgctgatctggaacctttggcttttgttttgttttgtttttgttttttgagacagggtctcactctgttgcccaggctggagtgcagtggcacgatcttggctcactgcaacctctgcctcccgggctcaagtgattctcccgcctcagtctcccaagtagctggggttacaggtgcacgccaccacgcctggctaatttttttgtaatttttgtagagacggggtttcactgtgttgcccaggctggtctcgagctcctgagctcaagcgatccacccgcccatgcctcccagagtgctgggattacaggcgtgagccactgcacccagccctcttagccattttgttaacctcatttcccacctctggaggtggtaggggcttcccaagaagatcacttggacctcttcaagtatggtggcaatattgctgggctgttggagagacttctgttatagaggctcccctcttgtgtttttcctcaaaggcaaggagtcatttttggtcacatgaggacaaagagaccagaccagtagtgcattctgttttgcatgggaattgtcaaggctctttcagttttaactgaaacccaactcaaactggcctaagtcaaaaacgaatttattcatctatgtaactgaaaagagtgggccacaagggggaggcttcaggctagctgcatctaggttttaaatcatgtgaacagatctccctttccccctcccccatctcttgactttgctgtcatctgttagtttcattctgaagcaggcttccaccgtgaaatagaagaggtggcaactggtgacatcatgagacgatgtgtaatctgagcaaccctaaccaagaacttattttccttagtagttccagcaaaaatccagagaggactatccttggccaggctttaccccatgtccacttctggagccaagaaagacagttccttctccaaggggaacccagggtgttgatactagaagatggaaatggatacagtaagatgctgccacagtgagatgcctcacccaggtctccctctgtcacttcagccaagcacatgggatagaaagtagcaggcggcctctggccctttaatggaagagggccatccagtcctctccagttaacatctagaccgaacacaaagcatccttctctcatccagaagacataggaaccctaccttcagggatgatttttttttaacagtgaaatcttaaaagtaactgtttcactaaagcctccagtatttactgaagactgtcagaatcatcctccatcactagatcttctccaccagtcatgttccctgagcagtggggtggcttgaaggtataaaccagagaggcccaagggagggatagttagcagacttctggtctttttctagtttgtgctcttctgttccaaggaccacaggtatgtcttcttctgtgtagttgttcactattgtttcaatgtgattcgtttcccacatttgaaaatagggggggattttactttaaaattcagatatctggctcctctttaggggaaaaaaaaaaaaaaaaaaacctaagacgtaacaatactggacccacattccttcatggtagcagttgataagaggtggatagtgacttctcccttttgaccgggtgtggactttccaactcaccatagtcccagttggcctgctttgttcaaagcctggccttgtaagcatcatgtttgagaccctattatgtccgaaagctttgcttctatcgtttggcctggggggaaaagctggattaatgtttagtcagcagcttattgggtgggtggagggggggaacagtgctgttgcttaggaaaagtaacaacccagtaaaagaatttatgggaaagagtgtgcacaactttggtctgtttgtggatttggtcgtttttttgctgtaaatgctgttggtatatcaaacctcctgtcacaaatgttccctctgaaatagtaacatgtccttctatcttatgagttgccacccagtgaaggaatccctcccactcccgagggatgttcatccagcctccgcttgaccacttccagcagccagggagcttattacctcctcacatggcagccagttccattcttggacagatgcgttattttaaaattcttccttatgttgaagcagctgctgcctctttgggactgaaagccacaaaatgctggagctgggaaggaaaaccgatttttttaggcgcgtgagctaccactcatccaccctgcatccagggcaaacattgataattaatcacagcactctttctcactgagtcaggaagtatgctgccttaaaattgtttttaattaaattcttttttaaaaattacaaaagtaatatgtattcacttgcaactagtgaagtagtacaaagttatataaagatagtgttaataatccccctgtttctccaagatagtgttagcagccgagggtgtattcttctatacatttatacacatatagacataaatattcatatataagatatataaggggttttgtatgtggcttttttttaatttaaaaaatggcattatattgtacatattactgtgtagcttatggacacccctccaagtagttacagatcaaacattgtatatagctttgtttttttgttttcttgttttctttttgagatggaatcccgctctgtcacccaggctggagtgcagtggcataatctcggctcactgcagcctccacctcccgggttcaagcgtttctcctgcctcagcttcccaagtagctcggactacaggcgcccgccaccacacccggctaatttttatatttttagtagagatggagtttcgccatgttggccaggctggtctcaaactcctgacctcaagtgatctgcctgcctcagcctcccaaagtgctagaattataggagtgagccaccacacctggccagattaggcatgtttttaatagatacgttatatcatacaatgtgggatctgccccagtttattaatcattccccattaatggatattcccattcatttcttcaggattcttctcatcgcagtgctccaggcagccactaccaatcgattggagttagcctgtgaggtaaaacctatttgtcatgtctcacccagtcccgctccttatcctacattctagagaagagaacagactagctccgtgatcaaagtgaatcagtggcttgggcaggactagaactgaattttcttgactttcagcatttcctctatcccatgttgtcactcccttggagtcatctaccctgcttttctcctctagagtaaaagaacaaatataatttcttttctgcgtgctacctcttcagatattcaaagtcagttatgccattccccttgagtcttctcttccccagaggaaaatctcagtgccttcaatttttttttcttaaaacaaggttttcaaatccctttaccatcctatgagctgttccttctatcttcttcccccctagggctatagaaatcccaagtgtggcttccacattcaccttctatagctatttatttattcaataaatatatattgagcaccttctacgtgccaggcactgttgtaggcactggctgactgtatggcttgcgttttggtcagtagagagaaacaaataagatgatacctgagagtgccaaattatataggaatgaaatagtgttaatataattggaggagtaactcctgagattggatggtcagggaagctctctctgaagaaatgacaatgagctgagacctgaatgacaggagccagcttctaggggaagacagttccactgaataagaaataatttggtacaagatgaggttggagtggccacaggagtcctatagggctcggtagttcaagataagatgtttggaatttgtttaaaatttttttttctttttttctgaggcagagtttccctgtcacccaggctggagtgcagtggcatgatctcagctcactgcaacctccgcctcccagcttcaagcgattatcgtccctcagccccccaagtcactgggattacaggcgtgcagtagcacgcccggctaatttttgtatttttagtagagacgggatttcgccactttggccagtctgatcttgaactcctgacctcaagtgatccacctgccttagcctcccaaagtgctgggattacaggtgagagccaccatgcttgaccttatttagattttatttaagtgcaatgggaagtcattggagaattttaggccagggaggtgacatctgatttcccctttaaaaaaaattgctggacgcttgtttaacttggagcaaggtttcattttccctcatacctttcctgcttcttacatccaaagggattggcaaccaggccagttcagtctgtttaggggtcccacaggggatctgtgaggcaagtcacagctgttgcctaatgcaccccacagccctcctcagcaagcgcacggaagttcagagagatgtgagtagctcccttagacctgagcccagtaggttcaatgggtctttgtatgaagttctcagtccggggaaccttagtcctttggcagccagagggggatggagctgaatgtggtttgaggatagagccaagggcactggttgcaagagagacagatggaagaaatgttgagtggagatctggagctcgagacacttagaaaaagccttcggagtggtgtccagaaaccaaccacctgaaaaataggtctgttgtttgcccagttgaaataacttttctttagttcctgcctaagaggggaatttggacactttgtagcttgtgagtttttgacttttgatctgtccccttcccctcaggttggcattttctttgcttccaggaggagcctgagacaagctggcatctctggaagtcggggacttcccaaccagagagtttaggtttggagtcttcaggggaattaagagggcagggagcgattcacctcagaatagagatgggtaaaatctgataaatcagagttgtgccttttccagagtcagggaagctgggttagagagggtgagattccctcagcctgttggtgatctttgaaaagccctttgtccatgcccacacctgatagatacccagccagttactaatcagatggctggctgcatacctgagatctccaccagggtcactacccgaccatccatcctctacccagcattgtgggtctagcttgaagtaatttaaagagcccttggagtcctatcagtaggttaggagtcacactgcccagctctcagagaaggtggccagaaaccagcaaggtcagagatgtgctgtgcttagtcatgtcaccttgggccagatcgccatcaattcatatcttttctcataatttgcagcctactatttcccacttctgaaaaatttttccaatatattttctgtgttaaatccgcttcctttgacactatgacagccaggtgtgagggccaacatctccttggtctctgggataggcatctaagtcccagtcacgccttttctctggatctgaagatttgggtgaaagtagctttaatatctggtgttggcttcatgtttcttccaggagctcagcagagcaagtaccctgaaagagaaaggcatgaggccttcatgccccctcaacccacactcaccaggcaagtttcagccccttctttctgtttgacccctttgcttcctttttcaggaaactggagaggcgtggctggaccaagacctccccccatgtgagcaggcttcctcctcccccaacaaccgttgccaccacgcccagaaacgtccttaagccctggccctcaggggaaaggtaacaggaggccagagccgggaccatgtgacggcgctggccctcgccaccgccgtcccccgaccctggccccaggcccggcaccatgatgttccgagaccaggtgggcatcctcgctggctggttcaaaggctggaatgagtgtgagcagacagtggccctcctgtcacttctgaaacgggtcacccgtacccaggcccgcttcctgcagctctgcctggagcactcactggcggactgcaatgacatccacctgctggagtcggaggccaacagtgctggtgagtttccacccttagagatgggagcacagcaggagggagacctggaacagatgtcacatggctaagaaggtcaacccaacaatgggactaaaaaacgtgggttctaggcttggtgggtggggagttccttaccttctaagttgtcatcatgggtcttctgggactgtgttgccataaatcctcaggcatggtatggtggacttatgggagaaggcaatgcaaactggaaactccccataacaggaagatcatgtagagtggcttatgtgggctgctgaaaggaacagactaaagtcattatgaaaggcgtatagaaggtgagcagtaattaatttcttaagcttcaggatatcagggctaggagggaatttgagaactcttccaaaattcatgtcatcctatactattctttaccctcaaaggtaggttggacttaaagcataagcagcttccagaaagttttgaatttagatacagttcatcctgtcagttccctaagtacttattaggcactctgtgtcctgtgagattggcattgggatgggtgagccaggcttctcttaagacctgtcccttaggccccagttgtagacaggagtcaggctagaatcaggggctactgctgaagctactctagctgtctgggcctccacagggctggatggagagctgttggccccagtgacagatgggagagatggaggccaaagaagagggagggtagtggatacccgaaagctagctgggaagggcatcaaggggctccatgcagtttgtccaaattagtcaccctaactctttgcaccttcttcttcagaataatagttcatattgagcctttacagcaagccaagtactgtctttacttgtatattaactttaaaagcagtgttcttggccagatgcagtggctcacgcctgtaatcccagcactttaggaggctgaggcaggcagatcacctgaggtcgggagttcgagaccagcctggctaacgtggcaaaaccccgtgtctattaaaagtacaaaaattagctgggcatggtggcaggtgcctgtaatcccagctactcgggaggctgaggcaagagaatcgcttgaacccgggaggcggaggttgcagtgagccaaaatcgtgccattgcactccagcctgggctatgagagcgaaactctatctcaaacaaacaaacaaaaaaagcagtgttcttacgtggctctcaagtcagactgtctaagtttaaatcccagttctgttacttgccatataaccaagtaacttaacctctctgtgcctcactttcctgcgcgccaccacgcctggctaatttttgtatgtttagtagagacggggcttcaccatgttggtgagtctggtctcaaactcctgacctcatgatctgcccacctcagcctcccaaagtgctgggattacaggcatgagccaccgcacccagccagtttcctcatcttaaattcaacatgatatcctgagaagtatgtaacctcagtaaaaaaaaaaaaagaaaaggaaagaaaaaagatgataattatatctaccttctagggtagttgtgaggattcagtgaattaacacgtgtggcttcctacatgcctgacatgtagtaaacaataactgtcagttgttaattgtcaataactcacttagtcctcacaacaaccccatgaggtaggtcctgtcattagccccattttacaagtcaggaaacaagcatggactgctaggattgggttttggggagccacacagctgcctggcctccctcatctccccaggcccacctgccttagcaacagtcacccttattttactgagtttttgtgtggaagtcacagaagcagcatgattgtagcgggagacggttactcaggccaggggtcacatcagcttagttcctagtctggcagtaagttcttagtcctagacaaagagcaataagaacccagctcagctgcagcaggctcggagctcagccatttctcacccctgccacactccccaccactctaacactaaaggcaggagttctgtttgtgatatgactctgcctttatagtgggggctcctgtggggcaggccagtgtcttacacagcttcgtcacacatccccactgtcccatcctgagcaggcagttggattacctctgggtgccactcttagctgtatatcagaatcaccagtagtacttagtaatttcagtgcttttagtttttgcttttgttttcagaacttgcagtaaaatcagatagtacaaaaggtgaaagtgaggtttttcttccagacttcacgttctcatttccttatgttttatgagataaattccctgcatatatgaatgcatatatattttccttccaactttgtcattgttttgtcttaatacatatggccaaacatgcatattaaccagtttggttttttcacttaccaatatgatttgaagatcattccgtattcagcacatacgtctgtttctcgttaagtatttatttacacctcacaacaactctgtactcccctgttactcccccattttacagaggagactgtaggtctggagatattaaatgacttgctgtgggtcacacaattgataagaggtagagttcaaatttgacttcagagttctttagagctcttgaccaatagactcttccacatggtacatgtggtcttcatcttacaaacagtgatgtaatgagtaccctttaaacatctctaggatgaactcctcagattctgcagaactgctagtttaaaggtgtatgcaattaaaatatttgttctccaggccaggcgcggtggctcaagcctgtaatcccagcactttgggaggccgaggcaggcggatcacgaggtcaggagatcgagaccatcctggctaacacggtgaaaccccgtctctactaaaaatacaaaaaaattagccgggcgtcgtggcgggtgcctgtagtcctagctactcgggaggctgaggcaggagaatggtgtcaacccgggaggcggagcttgcagtgagccaagattgtaccactgcactccagcctgggcgacagagcaagactccgtctcaaaaaaaaaaaaataaaaaaataaaataaaatatttgttctcaccacattgcccttgaaagacatgctgcattttatacaaataacctgaggcccgttcccagatggtttgcagtgggatattggtggtaatgcctagccagggttgagaagtgctgtgaaatgaattgaatgatgaatgaatatatgaatcaaggtttttatccatagccccatatcagatggtgagaataacaagctggtacttaaatgggtggagaggaaaggaaaacttagaatgagggaaggccatggtgtgttccagagtcagcaggaagcctgccaggactggagcaaagcatgacttgaaagagaagtgatcacagaggtaaattctggtagagtcttgaatgcctgttttctagtagacctgagggctctaagactaagaagcaggtgcctcctgtttcactcctaccctcaagtagaaccccacctgccttatttgtaaaggaaggtgctactttctgggcctggagacctgcctcaaagaaggagctgttcatactcttgtttctcctctggttattatggccttcccattccctggtgtttctcaaacttgcatcatcatcagaatcactggggttaggtgactgttacaatccagatttctgccccccatagacctactaaatcagaatcctgagggtatgggcctgggaacgagtacccaggttcttctgctcaccaggcagtgtgagaggtgatgccctgctggatgattcatttgttgtgagacatgagacacccaagagttgtagatccagctctccactaacacctcttgtgacctgggtcagtcctgcctgaccctctcgggcctcaggatccccatttggacagtgagggggttgttctggtactttccaggtacttcttgggctctgaaataatgtgccaaagaagacagagccacagccaagcatactactttcttttgggagaggcccagcacattattctagggcaagagttcttaatatttagcgggatggaccagttagaaaatcttcccctcctccccaccctccccaaaaagatgcacacctactccacaaaccaactcttgagttcagttggttcactagtccccagttaagagttccctggccgggcgccatggctcacacctgtaatcccagcactttgggaggccgaggcaggcggatcatgaggtcaggagattgagaccatcctggctaaaatggtgaaaccccgtctctactaaaaatacaaaaaattagccagacgtggtagtgggtacctgtagtcccagctacttgggaggctgaggcaggagaatggtgtgaacccaggaggcggagtttgcagtgagccgagattgcgccactgtactccagcctgggcaacagagtgagactccatctaaaaaaaaaagagttgcctgtcttcccggccgggcgcggtggctcacgcctgtaatcccagcactttcggaggccgaggtgggcggatcacgaggtcaggagatggagaccatcctggctaacacggtgaaaccccatctctactaaaaatacaaaaaaattaaccggacatggtggtgggcgcctgtagtcccagctactcaggaggctgaggcaggagaatggcgtgaacccaggaggcacaggagcttgcaatgatccgagatcgcaccactgcactccagcctgggcgacagagccagactccgtctcaaagaaaaaaaaaagttgcctgtctccaagcccttctttagcttggtcccttcaaacctggagagctgaacagtgaggtagatcccctgcttttttgtgggttgtatctccatgtcccaccgaaccaaccttagtacttcctccagttctccagggagaccttgggtgtgggtcagagctgcccagttgtctgcttcctgctcagatagatcaggtagcacagagctgacctaggtgaatatgtccctagctttgtgttagaatcccccagggcctttctaaaaataatgtgaagcccaggtcctatccctggagatttaaagctccctggttgactcttgggtgcacccagtggagaaccacttgtcttgatgctgacgctgattttgggtaggcccgggaagctggtgaggatactgttgtgtgacctactagaagtggggagtcggggcttatagctgtggaaagcctggcctaggtcatcgcttcctctcaggcagctgggaaggtatagggaagtcctccagcacaggcagccagcatcagtttcatggaagtaggacatgaggcgcaacacctagaaacagaaaagcaatattccaagggtctctggaacagggaagaagaggtcccaggttaccccttgttgtaatccctgtttgttctccaggtgctgtcttccctgcctctttggagctagaacaataaccctggtcctctcctttcctctgatgctgacttggaccagaaggctgttcctatggacaggaggaaggagactaggggggtcaggggagctgaattccacttccctccactgtcctgtagcttcctgggagacatttcctgcattttcttcccacctcctattctgagtcagtccccatatctagcaggtttaaactcctccctctctggctcattcagtctgggtggggaaactgaggtcaggaggggcaatggcaagtgagtcatcagagctcagccctgtcctccaccctccactttcaggctctgcttgacagttcatcaaacaaaaatgtgagccccctgccctcccctgtgtccatgtgagcaggggtgaggcagagaaggtcatgtttagagccaaaccctagcccctctgactggtgcctgaggctactccaattgttgcaccaggccagtacataaaaatgggtttgctcttagagcagtctcgattggtgcctgtaatttgccaggacccagggtcatgacctacttagctctagtcacctggccagctctgccctgctgccactatagccagggaggacatttatacgcacagcattcctcaacctctccatgtttgcagagtccaagtttgcagcttggtgagaagcagccgttggtgtcttggcattccccagccccttcccccatctgcccacctccagaatttcatcattgcttgttgtacttctagctccaaggaatcagagatgtgtctgtttttggtaaataactgtatgaaattccccacccctgtcgggaatcttaaggggaaggcccagatgtgcttttgtacatgaactgttcccaccagccctgaaacagcatgggctctagattcaacgaggagcaacaacaataatagttaaaatgtacttgagcacttaccacatgccagacgctttgcatgattgtctcattgactctttacaacaatcctgtgaggtagaggccttacagtccccatttacagaagagaccaaggatcagagaggttaaaggactggcccacaatgatattgagttaggtcatggaggcagagctagattttgaatccagcaagtttgcctgttgaacttgtgctcttacttagtatactctgctaggacctgagacagagtacaccactaccttccaggggaccatctgggttcaattgtgcaggtattcgttgggcctctgctgtgcctccactctgggccaggctttttctgatctgggcaggaaactagaagttccatccccacccattatttacagccccagctgggctcaccccaaggggcctgaggctgcacaaattacttgggccagttccagtgctcactgatgcttctcagtcatgggaggcccgccctccccaccaccaccacacagacacatgaacacacatttccccagaatcagcctccatttgtccaaaaccactctcccctttctcggcagcagaacaaggtcctgcattgagcccaacccttggggctgttctgtcatgtcccctggcagtaccagagaagctgtgtcccttagccctggggtcctggcagtactctggagtggggaaaggactagacaaggcttctctctgtcccagatgcctctggctatgctgcaaggcctaaacaacagcgattgagaatgtcagggtagggctggaggggcaggctgactcgactactggagaagagaggaaaacacccgtcactgagccacagactgaatgtttactatgagtacactctgtcagatgcttttcatgcatcatctccctacatcttctcagcagctttataatccttactttacagaggaggaagcatactgcccaggccactgtgtgtttttgactggggtgcatatccttgacttatttttatttttttttattttcattcttgactttctgtccctaatgggaatcactgtctttcttctttctcatcaagaactgaaaactacaggactaagttatcaaacagggtaccacagagttcttatcgtttgatccagtgccaggtggagttgggagggcaggaaagacaaaagttctgtgacttcagtgaggccttttctgccttggaaaatgatctttagatgtggagatggcctgaaggacagcttcataatcttggcagtcggttcaagtgaagacagacaagggaatgaggtttcctagctttgagtggcagatgctgaaggggatctggaaatccagggaagaagagagacttgggattggagagataaaaggttgtgggtaaaaagttcccccctggctgggcgcagtggctcacacctggaatcccagcactttgggaggctgaggcaagtggatcacgaggtcaggagatcgagaccatcctggctaacacggtgaaaccccatctctactaaaaatacaaaaaaaaataaattagccgggtgtggtggcgggcgtgtgtagtcccagctactcaggaggctgaggcaggagaatggtgtgaacccaggaggcagagcttgcagtgagccgagatcgtgccaccgcactccagcctgggtgacagagcgagactccgtaaaaaaaaaaaaaaaaaaaagttcctccctgccggacaccatggctcacacctgcaatcccagcactttgggaggccgaggcaggtggatcacctgagtttagaagcttgatactagcatggccaatatggcaaaagcccgtctctactcaaaatataaaaattagccaggtgtggtggcgtgcgcctgtaatcccagctactggtgggggctgaggcaggagaattgcttgaatccaggaggtggaggttgcagtgaaccgagatcatgccactgcactccaacttgaacaacagagcaagcctccatgtcaaaaaaaaaaaatggaggcacacagagcctggattcagatctcagctgtgtcgcttaatgggctctgtcacttagggtgtgtgacctcaccttcccaaatctgttttctcacctgcaagatgagcacaccaaaacaggattaaaacagggatgaaaagcaatcatttttagcatagtgtctggcacatagtaaatgctcaataaacagtatccttcattctgaatgaaagtgccatatgttattgctattgtcagtagtagcaacagcaatagtggtattggttctactattaattttaaccaatgctgtagacatagtatgagttgatgactttgaatgaatggatttaacaggtgttcccttggctgggcacagtggctcatgcctgtaatcttagcactttgggaggctgaggtgggcaagtcatttgagagcaggaatttgagactagcttggccaacatagtgaaaaaagtaacaggcaggacacggtggctaacgcctataatcccagcactttgggaggaaaggtaggtggatcacctgaggtcaggagttccagaccagtctgggcaacatggttaaacgccccctccactaaaaatataaaaattagccgggtgtcatggtatgtggctgtaatcgcagctactcaggagactgaggcaggagaatcgcttgaaccccagaggcagaggttccagtgagccgagatcgtgccactgcactccagcctgggcaacaaagtgagactccatcaaaaaaaaatagccaggcatggtggtgcacgcctgtaatcccagctacttgggaggccgaggcaggagaatcactttaacccggaggcggaggttgcagtgagctgagatcactgcactccagcctgggcaatagagcgagactccatctcagaaaaatagaaaacaaaaactaacaaacaggtgttctctcttggaagcttagagcaaagagccccaggccaagaaaatgcacagtctttatagccaggagttaggaactgtgtgagattcattttcctaaggctacaaacttaagcagaattaggagtgtatgtgaattctaggccacagagttctaaggggatcattaagagaaatagggctacagacagggcatttctgagtttgtatgcaaggccaggtgtccatccttcagtgtgggcagaggagaccagaagtccatggaactttttttttaagtcaatcctgaagcatgctagatgtccttggaatcgtaaaggcctaaggaacttgggttgaaagaccctcagatgtctaggtttccaagactttccttataggtgcttattcctagcctcttggtttcctgggcccagagatttggcttgtgcctttagaatctctgtgtgtatctgaaaggagggagacacagtgagatataataaccacaatactagtaaaagcagctagtgtttactgaggacttactctatgctgtggcctcacataattcatagcagccatgccaggtaggaatgattctgggctccactttacagatagagaaaatagagctcagtgaagtgatcacacttgcccagagtcacatggccagtaagtggtggtaaagggacatatgccacatctctgcctattccttttcatcacccactcctttggggtcctagctctgtctggttagagccagctcctttgcccatttccaagacctcaccattagcacatctctcagaactcctttgtgagatatttgtaagtcatcaccttggctacagatgtgagctcagttgcccaagggtgagagcgtagttggcctcagacctaaatctttgtctcttttcccaagtattggtattttttgtccctctccttgtcctgtcagcattatctccatcttccaccctgtttagctagtcacagaagtgctaatgaggttttttttttctttttcttttttttttttttttttttgagacggagtctcactttgcccccaggctggagtgcagtggcgcgatctcggctcactgcaacctccacctcccgagttcaagtgattctcctgcctcagcctcccaagtagctggaattacaggcatccaccaccatgcccggttaatttttgtatttttagtagagacaggctttcaccatgtcggccaggctggtctccagctcctgacctcaggtgatccacctgcctcagcctcccagagtgctgggattacaggcgtgagccaccacgcccagtgctaataaggtctttgagggggagagtcagacttgtaacagttcctacccaagccttctttgatgtggccagcctggggccatattcttagggacctcccttgtgggttgaaaggggaaacctgaggccgggcgcagtggctcacgcctgtaatcccagcactttgggaggctgaggcgggtggatcacgaggtcaggagatcgagaccatcttggctaatgcggtgaaaccctgtctctactaaaaatacaaaaaataagctgggcgtggtggtgggcgcctgtagtcccagctactcgggaggctgaggcagtagaatggcatgaactcagaaggtggagcttgcagtgagccaagatcgcgccactgcactccagcctgggcgacagagcgagactccgcctcaaaaaaaaagaaaagggaaacctggcttatctccacagggtagactcaggtcctcacacagtgggatagaaaggagaggtcaagatgaccatgacatggaacagccagggaatgcttcctggaggaaggtagtaagttaggccatctacaaaagagaatttgtataggaggaaggaggttgttgcgggccaaaaccttgaatctcagccaaggtgtggagcttggataaatacatactgtggagagaaccccaaggaagatggggagatatcctgagctgagtctttatctggaggaatgggagatggagggtgccctggaaatgaaggtgatgttaggctaggagttcttggacttgagtctgttggtgcttgctggttgccattataaactcctggtcaggaacatgacatcctgttgtgatttaggaagataaatgcatctggatgtatgggatcgattggaaggggagaatctagaagcagagagaccagttaaaaaacaatagcaagcatttattatgtcgccaaaccactttgtgttctttgctagctcattgaatctcaaagcaacactgtgaattgggtactgtaattatctccaaaatttcgcagataatttagtgctccatgaggttcaaggtagcttaccaagatctagctagtaagctggggtgtctagaccatctgattccagagcccaagcttttaactaccatataccactgccttctccattcaggaaggagactgctttttggcaggggaaatggcatagaggccatgaagaatggaggaaggagtcatggagataaagcatgagagcaggcctggggacaggagttgttcagattccagagtagcaagtttggctgattgggaggcactgcaggtttctgagaacaggagtgatagaacaaagaaaaattactctacaccagctgtggtgggcacatgactgtagtaccagctacttgggaggctgaggcaagaggattgcctgagtccaggagttctgggctatagtgtgctatgctgattgggtgtctgcactaagtgtggccccagtatggtgacctcctaggagtgggggaccaccaggttgcctaaggaggggtgaactggcccagtttggaaatggagcaggtcaaaactcccgtgctgatcaatagtgggattgcacttgtgaatagccactgcactgcagcctgggcaacatagtgagaccccatctcttaaaaaaaataagacaaaaattactccagaggcagggtcagtgtgtttgatctcacctatatgagggataagtttgggagttatgaaaagaaaatcgttatgaaaagaagattggagctgagggaataggccataggcagtgctctcaggtgaataggagtaccccaccctggctctcctgatatttcttcttatcccttctgtagccatcgtcagccagtggcagcaggagtccaaagagaaggtggtgtccctcctgctgtcccaccttcccctgcttcagccaggcaacacagaggccaagtcggagtacatgaggctactgcagaaagtgctggcctactcaatcgagagcaatgctttcatcgaggagagtcgccagctgctttcctatgccctcatccacccagccaccacactggaggaccgcaacgcactggccctctggctgagccacctggaagagcggttggctagtggcttccgctcccggccagagccctcctaccattcacgtcaaggctcagatgagtgggggggccctgcagagctaggccctggggaggcagggccaggctggcaggacaagccaccccgggaaaatggacacgtgcccttccacccatccagctcagtgccgccagccatcaacagtattgggagcaatgcaaacacaggtaagtggcgggggtgtcccagaaggccatgcctacttgaaaaaggttggactaggctcagtgagagctctctcgctctgtggcattagacaagtcacataagctgtaggcctcaactttatgaggcaatgcagaggctgtgaactggctttcccagagctgaatctgacctacagacatgtcttattgaacccatactttggtttggttttattttgttgtgttgggtttttaaataaatgtgagtggtacaaagaatcaagaatttttccctaaaaatgagatttccagcctttcttgagaagtcaaaagatctagcaactcaacaagatctgttttcctagtggcagcaataatatagagcttaatgttgagcatgccctttagaccctgcacaagtgccctagtctgcctctgctcccaccaacccccctttgggcatttctgatatatacctggcctctaagggcatcaggctatgacgcttgatggaggtgtgcataccatcatctgagatcccttccagttcagacaacattatggattttatgtatctggcctcactttacagctttgtttctgagaacactgtctgtataagacaaaactcatgctgcaaggtatttgtaatagtaggtagcatttttcagcattgactatgctaggtactcttttatagacacttttcaggtatgatctcagtccgcatcacaaccgtatcattagccctattcaacagatgaggacatcgggactcagaggtgaagtgatgtgttcaaagtcacacgtagaacaagtggtggaacagacccaaccagtctgatggcagagcctgcctctgaccactacactgtcctgccaactaagcaggtttgaaagagctctcttagtaaaagccctgcaggcgggagtgagcagaagttgttggtatcccagtgactttttgaaatgcacaggataagggagggtggattttccaagccatggtaaggcagcatgacctgacccagggtgagggagagggttcatgatgtaaacctcagagtagctagtcaccttcagcaggcactggtttaaagcaagacaagagagagtgacagtgaaatgtcacatgtgtcagtgggtgggggtaacctcgggtccctaatgccccgctgtctggtacctggtgctcatcagttattccttgagcctgtttttcccccagttagtgtggctattctggtccatctgcctccctcccagttgctggtgagaacctgggaagatagagggatagaagggcagtttcaggaaacttagcaacctgaggtgtcttggacctcattttccagtcatggagcatcacagttccaggatgggaggatgtattaataatgatcattctaggcaaaaaatattgagtgctagtccgggcatggtggctcacgcctgtaatcccagcactttgggaggccgaggcaggcagatcacctgaggtcaggagttcgagaccagcctgaccaacatggtgaaacctcatctctactaaaaatataaaaattagctgggtatggtggtgcatgcctataattccagttactcggggggctgaggcaggaaggtcgcttgaacccaggaggtggaggtggcagtgagccgagatcttgccattgcattccagccagggcaacagagcgagaccccatctcaaaaaaaaaaaaacaaaaacacacatcgagtgcttagtctttactaggagctattctaagaactttatacatataaactcaaggtttaaagccaggcattctgactatagacttcatactctgaactactatgctacactacctccaccaaaaagtacctctcctggagatgctcatccctcaccaaggggaggggtcacccaggcagggtgcctataaatttctttgtcttcataccttttgtgctccccatcatgggtaccccagcagccattaaaggatgaagattgaacaatgttgataggggtttggaccaaaagaggaaaaggaattgggcattccaagtagaaggcacagcatgaaataagcacggggtggataattagaggggacagtatacagacagatctggctggggtggattcgaatgagtaataacagtagcagagacttgtgcttaccgtgtgcctatccctctgctaaggacttcatgcagaaatggaggcagagaggtgaatgaagtgacttgcccaagatcacacagaggcgacagagtcagagtcaggatttgaactcaggcctgtctttaccctcagacctcagtgtgtgaaggctacattctggggggcgttgaaggacaggagaagcttttggattccaggcagttgcaggaaacaggaaatcattaaaatatttttgagtggggagcaaggattggcctttgagggcaggcagcttgggtttggggtgctgccaagaacagatcaggatttcttggagagtgcaaggccctggatctctggccggcattcttgtttttgtcattctcatgctgtggccagcctccaccccagtgcggagccaagcagggctcctcaggaactgcacgatcattccagtcagggtaatttcctgcctctcagcctctcctgcctacttcttggctgagaagggagaaagaaggaggccagagacaccaaaacaggcaaaaaggcctgtcttgaggattccccagtcccccagggcccagagtgtgccatgttccccaagagtgctgagtggggacagaagccagggctgagggagtctagaggctgaagaactcctgggaagaggaccctggacactctggggtagggcagaaactggtattaagggtgggccactgccttgccctgtcccttaggtgacttcctagccaggagcattagtattgtcacagctgagggaagatgctctggggcctgcaccaggctagccctccttcctgggctgggtgtcactgtagcactggcaggaaccccagcctttccatcagaaacaaggcttgggctctgtctcagcctgtcaactcccgtgggaactggggcaaagggcttcagctccctgggccttgatgtcctcacctacccagggtgaggctcgttggctttgtttcatttctttttgtctaggctgacttggggtacttctggatgccataggtggagctcagaggccctcttagcacccttttgtcctttatgaaacttcgttggaaggacttctgtgtgtcatgccctgtgcctgatcatgggattgcagaagtaattggactgggctgccattctccatggacccacagtccagtgcaagagggaggctagtgaggagggcagcaagcaagagggaggctagtgaggagggcagcaagcgccaggcctgaggcagcagcagaggggtacatgaccgaggcatgaagggagaagtggctgatggagaagagttggcgaggtgagcgaggcagaggaaaaagcacagataaaggtctgggagctcatgggaacctgccctgtcttgggagtggttaaaaatcaagttggaggccaggcatggtggctcacacctgtaatctcagcactttgggaggccaaggcaggcggatcacctgaggtcgggagttcaagaccagcctaagcaacatggagaaacccccgtctctactaaaaaaatacaaaattagccaggcgtggtggtgggtgcctgtaatgccagctactcaggaggctgaggcaggagaattgcttgaacccgggaggcagaggttgcagtgagccgagattgtgccactgcactccaggctaggccacaagagtgaaattccatctctaaaaaatatatatatatatgaccaggcacaggtggcttacgcctgtaatcccagcactttgggaggccaaggcaggtggatcacctgaggtcaggagtttgagaccagcctgaccaatatagtgaaaccctgtctctactaaaaatacgaaaaacattagctgggcatggtgttggccacccgtagtcccagctactcgggaggctgaggcaggagaatcgcttgaacccaggaggtggaggttgcagtgagccaagattgcaccaccgcactcggcgacagagcaaaactccatctcaaaaaaaaaaatcaagttggattcctttgccaacctcagacttgggatggacagagggtatggagcatccttcagaagaggacctgggatcaccctgagtcaccaggcctcatgagtggccagtttgggctcactgcagaaaaaaaatgggaggtagtgaggccccataacagggttgttgaggaagcagcttacgtacttcattcattacaagatataatgatgtttaagatgggacaggtttctgctgtcacaggtcttctattctagcagggggtgtagttaataagtaaacaggctgggcgcagtggctcacgcctgtaatcccagcactttaggaggctgaggtgggcggatcacgaggtcaggagattgagaccatcctggccaatgtggtgaaaccccgcctctactaaaatacaaaaaaattagctgagcatggtggcaggcatctgtagtcccagctactcgggaggctgaggcaggggaattgcttgaacccaggaggcagaggttgcagtgagcccagatcgtgccactgcactctggcctagtgacagagcaagactccatctcaaaaaagtaaataaatttttaaaaaaataaacaaataacttgataatttcaggttgtgatgggtgctgtaagaaagacaagacagtaatgtgatagagtgacggattggggcagcagaggtgggcagtgacttcagattaagggttcagggtaggcctcagaggaggcgacacttgagatgagacttgagggagccaaccgctgagatcaagaaggtaggaagaaagagcaagtccagaagtcctgaggctggaacaaccttgagtgtttcaggaacaaaggggagtttgggaggaggcaaaggctagagaggcatgaaccaagtggtgggttgtgggagaggaacaggggccaggtcctgcatggccttttaggcatgtggaagcatttgtattttgttcccactatgaaaggaagtcacagggatttgagcaggagtcaggctcggtcagatttgcatttttagaaggacctttatggctgttgtgaggggcgtggactgtaggaggcaagagtgaaggcaggaaaccaatgaggaggctgtggcagtaattcctgccaggggtgctggtggcttgagccagcggaactggagaaattcaggaaagtggctgacagcttgctgatgggttgggtgttggaggtaagagaatgaggtatatctggtaggcagttacccttggaccccaggtcccttcctcttggcaggttatggggccaaactgccatcctggcactgacggcagggggatggtctcctgtggttgggtccccaggtctaatattttgcttttctcccactctggccaggtctcccctgccaaatccaccctagcccactgaagcgctccatgtcactcatccctacaagcccccaggtccctggtgagtggccgagtccagaggagcttggggcccgggctgcttttaccacgcccgatcacgcacctctctcgccccagagcagcgtggcctcctctggcagtgagcagacagaggagcagggctccagccggaacaccttccaggaggatggcagtggcatgaaaggtacattggggacagcagcaccaggacccttttccaggggcttctgcagagcttagaggacagaaaggagcttgtagctgacacctgcttacccctctgaggaggggacatgtctgaggggagtagatagtccctgcttttagggctcaggactaagcagagagaccccacatctaccctaacaagttctagtctgactgggaaggagccccctgtcttcacacaccccagtctgacaaggaagccaggacacagctaagtgatggaacagaggttccagcaagagttttggagcaatcagtgaggtcatcctggtatacatccagcctagcagcttagaagggtcagatgtccttcccagggaaggctgcctgagggtctggctaggcagatgaagaaggagctgatggaaccttagctccccccaaccccctcccaattttttgcatcttttgaggcttcctgtgggtttatccccacaacttttcctttaccctggtaatctgggccaaactcctgacctttcactctccctcctttgccaaagatgtgccctcatggctcaagagcctccgtttgcacaagtatgcagccctcttctcacagatgagctacgaggagatgatgacactgactgagcagcacctggagtctcaggtgaagccaaggggaccatcagggaggtgctgggggcagcgctagtttggcatccttgcagcccaagcctcctctgtctccttgatctctatttgggtacccccaaatatctcagcctcacatctctagcttcctgtccccttctgcccttatcacagaacgtcaccaaaggtgcccgccacaagatagccctgagcatccagaagctgcgtgagagacagagcgtcctcaagtccctagagaaggtgaggacctggtttctgcatcttcaaggccagccagccacttggtggtaccagtagaccaaaggccctgagttggcctccagactcctcggatgtggcctccaaaattcccagccctagggacccagacttcagggaccacatgcaagccggcatcaaaaggctcacttgctggtggctaagagtctcccctccctgtctttcctggtttgtggttccaggatctctgtcttttgactctacaccttctctccccttttgcttttccatttcttactggtctttctggtagagcagagtgtctctgtctgtacaatctctctttccatttgattgtttctaaactcattttccttccacatctgattccgtttccttgccactgccttctgtttgtatttttccctgctcagtgtctaggtctgaatctctgattctatccttgttgggtccttgagactccaacattagactggcttttcgtgagttctgtgggacttcatcttaatgggaaagaggaaatgtgtacctatatgtttgtgggcttgcagtacccttacatgccttctctatgtgctggaacccagggtcctacccagccttctgcaagccctgtctgactctctgtgtagatactctctgtccctcattgtagggtctgcatgtgaccccagcctgtgtcctcccatccaggatgtgctggaaggcgggaacctacgaaacgctctgcaggagctgcagcagatcatcatcactcccatcaaggcctacagtgtcctccaggccaccgtggctgccgccaccaccacccctactgccaaggatggggccccgggggaaccaccgctgccaggtgctgagcctcccctagcccaccccggcacagacaaaggcaccgaggccaaggaccctccagctgtggagaactacccacctccaccagctccagctcccactgatggcagtgagcctgccccggctcccgtcgccgacggagacatccccagccagtttacacgggtgatgggcaaaggtgagaccagccacagcctagcaggaaatcctgaggcagaaagccaagtgaacccaagcaccagggatcaaatccaagttcgatggtgggagcagggctttgtaaagcctactggagactggaacactacagagagtagccaagacagggtgacaaggccccttgcccttgggcacgtctgggctgatggtggataacagcccttcccctcaaagcgtctccaggctgagcagaaatggggcagtgggtcagaagaaattccatgtagtaaagggtgagcagttgaggggagtccattgatttctctcagaggggaccaaagtccaggggatggggatggtgaaatttatcacagcttcagcctttcctaaagcagcatgatacagcagactttacacttggatccagatcagtctagatctggatctggacctgaggcaagtgactcaactctgagctttaggtttctaaggctaaaaatgtgtgtagtgacaagattgtgtcaggcactatgttgtatatcctcatgataacccaaataccatggctagcacttaatagttgatattcatccagcctgagtctcctgttccttcttgtgcacgagccagctggaggctggaacatggcagagggcatactaggggttaacctcctgccctttctcatgtccccccagtgtgcacccaactgctggtgtcccgaccagacgaggagaacatcaccagttacctccagctcatcgaaaagtgcctgactcatgaggtaaggccttccctagcatactcaaaaagggaaaggcggccaggcgtggtggttcacgcctgtagtcccagcacttcggccaccgaggcgggcggatcatgaggtcaggagatcgagaccatcctggctaacacagtgaaacccagtctttactaaaaatacaaaaaattagccgggcgtggtggcaggtgcctgcagtcccagctacgcgggaggctgaggcagaatggcgtgaacccggcaggtggagcttgtggtgagccaagatcgcgccactgcactccagcctggacgacagagtgagggaaagcctgccccatctttctcaagaccattgtgttgtatgtggcccatagggccttacctgacgtggcacatgccagcccttccagtcttgtatcttaccagtgttggctttagaggcttcttctcagaacccttgtacacactcttcctctctctctctcttttttttttttttaatagagacgaggtctcacactgttgccctggctggttttgaactgacctcaagtgatccttccacctcagcctcccaaagtgctgagattacaggcgtgacgattttcttttttagagatggagtattgctttattgcctaggctgatctcgaactcctggcctcaagcgatcccctgccctggcctcccaaagtactgggattataggcatgagcaaccatgcccagcccgtacatactcttttgtcagcaacagtaccctttcctcctcctcacccctcagctgtcagttcaaacatttatacctcagggacacctttaccaacccctcatttttatttaagtttcttttgcttcctgttcttctccctcagggagggataatttgtcacagttatcatcatgtatgtatctttccctcacaaccagactgtaagctctctgggcatggtcacctctgcatcccagaattgcctggcacaggcacagagtagatgagcaatgaatcttttttttggaaacagagtctcgctctgttgcccaggctggagtgcaatggcgcagtctcggctcactgcaacctccgcctcccaggttcaagtgattctcctgcctcagcctcccaagtatctgggattacagacacacactaccatgcctggataatttttgtacttttagtagaggtggggtttcaccatgttgtccaggctggtctccaactcctgacctcaagtgatccacccgcctcagcctcccaaagtgctgggattacagcttgagccaccacgcccggccaggcaataaatatttgaacaaatgaatggaagactggaagggaggtctgaaggaagcatcaccctctctgcttcaccggtgtcctgccaattctaggctttcacggagacgcagaagaaacggctgctatcctggaaacagcaagtgctgaagctcctccggacattcccgcgcaaagccgcactagagatgcagaactaccggcagcagaaagggtaggcgggtggccaggttacagggacctgccctccataggcctttgctggttagcagatcgtgcttagaggggtgattgtgttctgggctgagaatctagttttattcagtcactgggcgactttcccagaagaaaatttccactagaataggatgctgagctgaaaaacaacacatgtcccatgagcaggcccctcatatgtaccttgctcctcgcctgtatgcagagggcctggaagtccctccttagaccagacaaataacagaaatgtctcctttgagaattgaagattggagaactgttttgagtggacagtgaagaaacccttgtacatgtcccatctccttccagggggtacccttggggcagatgaggacagaatgtgtgatggaggtttatgttctctcctacaacttggggttgttggggaaggtgaggaaggggtggacagataggccccatctatgtaaattaacaccctgccttctgctctctcatagctgggcattcggctccaactcgctccccatagctggctctgtggggatgggagtggcccggcgtacccagcggcagttcccaatgcctccccgggccctcccacccggccggatgggcctcctgagcccctcgggcattgggggtgtctcccctcgacatgccctcaccagccccagccttggaggccagggccgacaggtaagctggctggaagcaggggcctggcctcctggggttggggtggcagtacctgggatgtctatttgcctgtatactctgtgtctggacccagcttagaggtggcgggggtgggagtgggagaaggcctgtaccacctccaccactcttgggtctgggcctcttctgcactcactactttctctcttcctgggacctgtgtagaacctgtggtttgccaaccctggaggcagcaacagcatgcccagtcagagccgcagctctgtgcagcgcacccactcgctcccggtccactcgtcaccccaggccattctcatgttccctccaggtgaggtgccccacccttgggactctgcctggccaacatcctcagctgacctttcttttttctcctgggtctcatgtccactgttcttctagactgcattggcacctctccccatacctcacaccactctgcacccatctcccccaattgtggggggttgttttcctcctctgcttcaattttatctctcaggtcttgcccccacccctctgagtcatcatctctcaccccttactcctaccccatctcatgtttcccaccctatgtcataatcttagtgtctgtgttgctctttgtcatcatctctttctttacaggatcattgaatactcaacttagaaggggttgaggggatgggacagttaaagtgtgagatttctgtggaggggagtcctgcccatcagcctactgggattctttcagatgccaggtgaccacacaggaaccagtggacttcacctcttagaacaggtgtttgaagtgagagggctgttttgacctctgcttacagaccatcctggagatgggagagcagaagttgggccaagtgcgggcacagtaactcacacctgtaatttcagcacttttgggaagctgaggcaagtagatcggtttgagaccagtctggacaacatggcgaaaccccatctgtacaaaaaaatacagaaattatctgggcatggtggcacacacccgtagtcccagctactcgggagggtgaggcaggaggatcgcttgagcccaggaggtcaaggctgtagtgagcagagattgtgccactgcactgcagccagggcgacagtgagaccccatctcaaaaagatgttgggacaagtgggcaaaaggaagattagagacttgctaaccgcaggtccctgccctgctcaacaagtgaggggttgactcctccacacggtgctggccactggggctgcagagacagataaggctcgtctggaatgggctgactctagagagagcatggatttgcagaattcatgtcataaactgccaagtcagtcaggagtcttacttgatgaggttgtgtagacagccatctgttgaggccgtgggaacccatccatcatgttcatcctagcacagggcttgacacacagtaggcatctgtaaatgatgttaaacaagcaggtggatgaaccgcaggaatgaacaagaaccattctctttaccagcatgctgtgtcccaggctttgtcagacagctctcctgcactgattgactcctcccaactgtatgtgtaaggacgctgatgttattcatcagtcagcaatctgagacaggtcttgcccaagttcaaaaaaaaaattcttttttttaaggagagacaattgggtgatctgatacgacatgagctcagggttcagagggaacagtgatgagagatgagggtggagatgggagctgggtcgtctaaatccaggtaaacagctcggactttgtcctgatggcagtgaggagtcagggaagggtttaagcagtgtagtgagggaggtcaggtctgcccagggaggtgggtggtttcccagatgcccgaataggaggcccttttgagaagtgtggtttgaggacaagtcccatggtggttgtcctactttgcccccacctgcctggcctgcctggattgaatcctgcccagaggagcaggtccaagtggggacaggaagggttttgatttagcttttgcaccaagtacagagcaggtcttcaatcagggagccttgggggctgcccagtgtccagggcagatgcccagactgtgctcaagacagtatgcagtctgtgtccagagtagtcacagcaggctgtgtgtggcctccaggagctccttcagtttcaattccactctctgcaagtcgggctttttctgtattgccaagcctctgccattgccattgtctcctctgcctgttgtgtgacacgctcgcctctctccctgtccacctcctcccgttcttccctctccccctccatctctcttgctcccttcccataccagcatcctttgtcatcccagctgtcttcacctgagtccagttggtccttaccacccccattctcctctctcccacccagactgcccggttcctgggcctgacctggagatcaatcccactctggagtctctgtgtctgagcatgacagaacacgccttgggtggtgagcatttcctctttccctgacccagctcccacctacccagcgtctctgcctctgaactgagcaactcagagtcatcctgaggggtccccaggggaggccagactccagggagggcctgactgggatgacaggctacctgagtgccttttcttgggcctccctccagctcctgatcttcctcccttcctccctttcttaccacagatgggacagacaaaacctccaccatctgacgggacccacagcccagcgcacccataggctccctgggcggcgggcgggggccaacccccaacgggcttctccgcgacagcgagagggtgggctggctcagctatatattctaatatttttctactctcttaccctcttaacttttgtttaacattggcacatgccttgctcactcccaggcccgtcgagggatctctgctgaggcccggggagttgggggcagccaggataaagggggcagggactggccagactgcctgcctctctcctttccttcctcatccccacctggtcccatcccacccctgcctcctccagaccgctgaccacctgcctctccccaagggagcagactccccagagacaaactgaccactaccttgtggagcctgctcagaaacatttgacatttggggtgacgcgcagggcagagaacctgccctccagaatgttattgagaggagctggggagaaggaaggggagcaaggagaggaagctctctctcctctccctgcttccccttcaccattccccacattctgcaaggacaggagccaccttcctctctctcacctcccctggccctgttcaccagaggttctctatgattaatttcttaggcctatttaagatacatatttatatagttcttaacggtttttctctgatcatttcctctcatttttagaatccccaggtctctctcagccaagacagtggcagggagagcctgaactttatgaggggagagggcagagccccctcctccagaccctcaagctctaacccattttcctccagccctggctacccggatgaagaggttggaggtgggcagccagggtagccagtgaggtcaggaagtctgttgccttaacgtccccttccccacgaacacacacccttctccgctcccaggtctggttggtgagacttgggagtcaggaataagggaaaggggattgtttggtttttgggtttttccctaagcccctcccttttctttcagcctttttccttcccccattatgtcatgacctcacttaagtggaacactatatcataacccagagattcgtcccagccccagagtccgacagactgtctggtccctattcctaatgaggggttgtgttggggcccaggtggagggaggggatttgggggttcagactgcggggaagccagggtctccctcttcaacgccctcctccccctcaacccaccttcccaactgggacattctcaagcttttcacaccgaaaaggaaaaaaaatgttatttttagatacattttatgaataacttttgttatgaatatggctggtaaccattgtgtatgttattaaagatacaaaatgttgggaaaaaaacaaaaaaaacaaaaaaaaaaaaaattttaaaaccaccaccctccctgcactatcaccccattccccagaccttcttgcccccgccctcctggtctgtggacttccctctgctctgagcccagggagggggaagaagccagggggtagggtggccctgggaacctggctctgggtccccacttcctctcccagtgccgggctgggtggggtgtcaggtttatttatgtacctcttgcacactcatcaacctatgcaagtcccccaccccggccctccatgtttctgtgcctttgctcatcccctcaatctcccagggcttctccagtccccctcccactagctgcaggaagtgggatggatgggccacctcgtttggaatcagcagggtgtccctctcatgggaccctcccctctccccagcctgtcctgtcttgttcactctccatcagggtgagctgactgtgcctggcactgggaggtggtgagggacaccgtctcacacacacagggaggcaagagctgccccccaccccacctgacagcagagtgtgcaggacgcaggcggccccactctgatgggcaggaccctgaccctctcccgctccagccccctccccaggccctcctccatgatttcaccctccctacccacttctgtccccggccccactggcagaatcagctttgagtaactgtacagtttttctcgctgttggagaagacttatttgttggagtttcacttgtttaatggtctgggcttattttggaaaaaaaaaaaacaaacaaaaaaaacgaattctgaccttcgttgtgctacattttgtgggaaaccattggccctgcctctggcctgtgtttctaagcctcaagccaagatccttgagcacctgggggttgcgggaggtatgtgctgggctgaatgacatcataggggctgggaggggaagtaaagagaagttgactttattaacagcaaaggtttgggggtggggaacaaacaagtgaaaggctcacaaacagaccactagaaaagtgctttgctgctcacaataatggtgtctgaaccagccctgaatgccctgggactcagtcactgtcactatcagcttcactggaatcagaagctgcagcttcactgccatcctcctgggccgagtgctcgctgccactggggaagggactggcgctgcggctgtggctccggctccgctggccacccccattgctgccgctgtctgaatcattgtcactgccaccttgggcctgtcctctgtcctcatcatcagagtcggcatcgtcctcagaatcagcatcactgccaaagatctcctctttgtcacgggcagcccgggcctcatcctcgctgctctcgtcctcaccactgccactcttgtcactggcctcgtccctgtcaccttcctcccgttcactctcgctgcccgagtgctcatcttcactgccctccttctcactgctgctgcccttctcctgctcctcatctggaagggagtggagagagatgaaacccacttttccaccctcccagggctcccagagtctggcctgtccagatttacctgagcccccagcttctttctcttctgtctccatctcctcttcctcttcctcctccggttcgtggttttctagctgggccttccgtgcctcctggaagcagcaagattggaatgaggggaaggagggtgttctgctgggtttttgtccccctcctcacctacaaccaccaccctccctgccatgggtgccctgagccagtggtgcttgttacctgagcttccagttccttctcattcatgtcccgatgtttgaccacaagcagggcgttggtgcctgactgaaccccagccttggcccggcgcttactaaggcggaccctgcagggggtgaatttgggagagagaagtggaagatgcagttaaagacacacctcccacttccccgccccccagtgaggggtctggtctgacttggttccccatcaatacttagagtaaatgggaataaatacagattgaataagggcagctaagctcaaggtattgagggcaggggaaaggaaggatggctcccatggcaccagtttggttgccctacactgtgtgtgtgtgttatacggtgtatttacataaatacgggcatgggccatttaacagggacacattctgagatatacatcatgtgaacatcatacagtactcttacacaaacgtacatagtatagcctactacatacctaggctgtaatggtgtagcctattgctcctaggctacaaggttgtacagcatgtgactgtactgaatactgcaggcaattgtaatacaatagtaagtatttgtgtatctaaacatagaaaaggtatagtaaagatacggtattctatcttaagggaccaccataagcagtccattgttgactgaaacatgcagtgcattactgtatgtgtcagttagttaccaacactttgagaaaccaggagatgtcaaatcatttggatttggggcttttggaagataggaatttctggccccacagcacagcaacagtgggctggaagtgaatagtgccctccatggttgcccagaactccaggtcactcagatgctaccagccactgctcttttacatttcctgcctggcctatggggtcacagttcttgtaatctctgctttaaacagaaactcaagacttcccaactctacaccagaggtgctggcatagcagtaaactttgagccataagggaagagttttggagtcacatttttgaacatgggtttaagcatttcatttaaaacattcatgctaattttatatattactccatactttggcaatgtttactttcacatgaagtctgttactaatactgggaaacttggccctctgccttgcgcaaaggctctaaatgtctcctgcattaagatattctggctgggcgtggtggctcacacctgtaatcccagcactttgggaggccgaggcaggcagatcacctgaggtcaggagttcaagaccagcctggccagcatggtgaaaccccatctctattaaaaatacaaaaaaaattagctggccatgctggcacacgcctgtgatgccagctactcaggaggctgaggcaggagaatcacttgaacccaggaagcggaggttgcagtgggctgagatcacaccactgcactctggcctgggcaacagagcgagactccatctcaaaaaaaaagattttttttctggctcctcctgttagaaccaagtccagctcatgtgcatgaccagacatctgctgctcttgtttaccaatgcatatgacaaattcttaggtacaaatgacctccaaggtggctcttgcatgccccagggtcttaagaagcacagatccaggctaatcagataggagtgtgctgagtacctggtttccaactcattgtagtaaaccccgtcaccctctcggaagatgaagaagtagttttcctcatagcccttgctagctttgttcttcacgttccagttgtactcccgagcaattttgtagtcatacctgaagatgagggcacaggttcagccccatttcttccctatcccaatccccaaaacttcccaatccccaaaacttaaccgcaacccacgcacacatcatctggtgcatagtccatctcctcctcctggtcccgctttcgtttcttcaacgtctcttctacaggcaggaaataggccacaaactggttcccttcctcatccatcatgcccctggttgggggaaaaggagtagcaatgaagtgtgaggacaagaggcagcaaggagcaggccaaggtggacagcaggaccacctacctaatcatggcctgagacatcatctccaacgcagctgcaccactcgtgtccttgggggctgggtctgagtcaaagatcacctgagcacatggattgatccacatctagggagatggaggcactggggttagatgggaacaggcacaaataggctgtccctttctacctcccaccttgggcctgaccttaaagtctgggaagacaggcatgacctccaccggtgtgactcggggtttgctgtaatgctgtgagatctggtggaacaaaaacaaggtgaggaggagctctgcagccgcacccttgcctctccccatcccagtccctcaattactgatttctgggcatcctcaaaagtcttctcaatggctgtgatctggctatccctgtctttgtatatttcttcctcggtaaactgctgcttcacagaaaccccaatcctaggaatgaagaaaaaggtccttaggggccactggacacacctaatatctccaccttccctctcttcctgttagtaacttacttgacctcaggcttctcattggagatgccataacggttgaactcagtggagatgtactctgtctttcgcatccatggcaccaccttcgcgtgctgctgggatctggggtgggaaatcaggtatctcaggaccccactgccctcctgcttgtagggcccacctgagccagtctccagtacccatttgctacccactcacctcttggagctggtgggggcctgaatctcctcttccaaaagtttctcatcagctggatctagaagaactagaggagagcggggggcaggaggaccatgagggaggcccaggcctgagcctttgctgacctagagcagaccctccctgtctccccacacaccattggggtcgatgcggtaggtgtcaggattgatgagatcgatggtgacccccaggtctggctcagtcaggaggtcatgtttgtgctgtttctccaaggaagtggctttgtactggacgaacctgggtggggaaacacctattgtggtgtttggattccagcttcacccctcacagccctgcttcccagaggcggagcttctctggggaggaactcagaatgaagtgtcccccatggcagagtctgaaagctggctccccagtgggaagggacttggacactgcttgctccattaacaattgagcagctactactatgtgctagggtaggtactgtgctaggccctgagcagacagcagccaacgagacaagcagtccctgccttcaaggaactcatacctgagtagttttcccattccttagtctcacctgttctggtcgaaggggtaggtgatgaacttggggtcgaaggggatatcagggaggctattgcagtacttgactcggcagaccactccagacctaggaacattagtggctcaaaagtgggcccccgctgccccacctctgctcccagccccactgccccaccgctcctgggaaagcacagtggggctcacctctcaggcagagtccggtgggaattgggcctagtggagaagaaagaaacagtgataggtggagaggacgggattgacaggagaatgaaaaaggcttccccaacctttcaaaaggtaggaggggtgacaaatgctggtttctttgggtggtggtgtggggagtgtccaaatgctttaatggaaggagacaaatgttcaatttatttaggaagaaatgcccccaaaagctttaatgaacaaggccaagtgctcaatcccttttgcaggagatggcttcaagtgctttaataaagaaccatgtactcaatcgtcttcggaagaggggtctccaaacggttgactggagggatcccttctggagggagtctccaaaagcctaatccctgaactgcacggcggggaggaggggaacacctgaatctcagaaggaacccgcccccttcgtcaaaggtgagcgcttcatgacgtcacgggcagacctgggggctggtgacgttgttcagcagaaaccctctcccgatcccccgccttgctgcaacagaaaagcgtggcgcctacctgtggccatcctcccgctgggcctgggtctggatggtgggcgccatagcgacgaggcgacggcagcccggacggggtcctagcgggaccgaagggggacgcagaggggcgtgccgacttcaggggacgcctgatccgaggaaggcccagcttggcgccgctccccgcggaaagtgggttgagatgaggtgggcgggcgagaagagctccagcgagactcaggtgaacgcgcaggcagcaccggggacggactcgaagctccggttccaccaactgccgccaagacgctgaggacccaacgggtctcctcaggccgcgacgccttcggggaaatgaagtccggctcggaaccacacacggattggcgagcgtctgggtgaagggcggagcgagggagagaggtgcttctgtgattggtggagagatatctcagtctggacgcagatttgagagtgacgtaacgttggggcacctccttcccctccattggcttaattgcctagggggcgggactaactagcaaacggggactagaaatagggatgctgaaaagcaacggggagagacgcagtcgtaacgcacttccggcggtctacgcgaggaagatggctgcatcccagcagcaagcttcagcggcttcctcagctgctggtgtatcgggtcctagttcggctggcggcccgggtccccagcagcagccgcaaccgccagcacaactggtgggccctgcccagagcggcctcctgcagcaacagcaacaggacttcgatcctgtgcagcgttataagatgctcatcccgcagctgaaggagagtctacaggtgattggccttaagcagcgagaagcaaactggatttggtagtctagaggggcaggccgagggccaggttagtcggagagagcgctaagcagaaagaggaatagaacctgctgttttggcctggctggtgcacgcctgtgttcccagcactttgggaggccgaggcgggcggatcacttgaggtcaggagttcaagaccagcctggtgaaacctcgtctctactaaaaatacaaaaattagccgggcatggtggcgcgcgcctgtaattacagctactcgggaagctgaggcaggagaatcgcttgaacccaggaggcggaggttgcagtgagccgacatcgtgccattgcactccagcctgggcaacagagcgagactccgtcaaaaaaataaataaataaataaataaaactgttgttttctgcgagacctaagcgaagctcggcagagatgggatcagcgctgatgctgaggctgggactggccggagcttgagtgaggggttgtttaaaggagaaactgggctctggtcgttaaagcctgaggagagtactggcttatacggagattctgcccttgattgataggtgagggaggacccttaggttattggcgagaagctcaggtgagagcgggcctctgggaggatggagtggtgacagctataggaatggaaacgaatattactttggaaagtcaggagggaaggtgccagttgaaaagaaaacctgagactgagtgatctcaagaaagagtgtagatctgccagaggtattcccttttgtttttccatttcccacgtgttttgtttttgttttgactagaccttgatgaaggttgcggcccaaaacttgattcagaacactaacatcgacaatggacagtgagtgcagccccctttaccaggatattctattgccttcccagtctttgaaattcatctttccttctcctgctccccgcccacctcaccttctatatttacttttttttttttttttttttgagacagggtctccctctgtcacccaggctggactacagtggcacgatcttggctcattgcagccttgaacacctgagttaggagatcctcttgcctcagcctcccaagtagccaggactacagacatggctacagactacagatgcctggctaatttgtaagatttttttatagagacggagtcttgctatgtttcccaggctggtctcaaactcctggcctctagccatcccctcagcctcacgaatcacttctcctattttattttatttttgttgttgttttgtagagacagggtcttgccacgttgtccaggctggtctcaaactcctgggttcaaacagtccttccaccttggcctcccaaagtgctgggatgacaggcatgaaccatcatgcccagccttttccttttctttctttctttctttcttttcttttttttttttttttttttttttttttttttgagacagagtcttgctctgtcgcccaggctggagtgcagtggtgtagtctcagctcactgcaacctctgcctcccgggttcaaatgattctcctgcctcggcctcccaagtagctgggactacaggcgcgtgccagcacatctggctaatttttgtatttttagtagagatggggtttcaccatgttgtccaggctggtcttgaactcctgacctcaggtgatctgctcgcctcggactcccaaagtgctgggattacaggcgtgagccaccgtgcccagcctccttttctttttttttgaacccctccggttttcaaccactacttcagatctcctggacctgtacctggtttcctgatggacacttggttgggtagatactggtgtcccaaagattagaaatcaattcttcagacatccttttttccttgtctgtagaaagagcagtgatggacccatacagcgctttgacaagtgcctggaagagttctatgcactctgtgaccagctggagctgtgcctggtaagaagccttctggacacggggtaacaacagccgtgtcccagtctctggggtcttcagaaacagtcagtcagtcaactcacactcaactggggacctcctgtgggccagacctgtgcttccaccaacactgaggacacagggttgctctgatccttgcccttgcagagctttcagttgagtggaataataagcacacccctaaacagtgacagctcagagtggtcagtgctgtgatgggagaagcctaggccagagtggttagggttatgattgaggaggcacaggcagagggatcagggctgggatggggaaatctcagtgtggaagcccagggtggggatagggagagagtggcttagggaaggctactgctagacagcacatctgaccaagtctgaaacaaagaagagaagaggggcaggagttgagaggagggtaagtgactaagaatacagcctctggagtcagatgcaccatcaatctctacctctgacctctgggttcctccttaggaaaacggagtttccaggaaaacttagattatgcgtgtaaactgcttaacatgataccaggcatatggcaaatgtgtactgtagtatcatcattattttggactggtttttttggtgggggggtgtgggggaggacagtctcaccatcacccaggctggagtgcagtggcacgatctaggctcactgcaatctcctcctcccagtttcaagcgattctggtgcctcagcctcccaagtaactgggactataggcataccacgcctggctaatttttgtatttttagtagagatggggtttcaccattttggccaggctggtcttgaactcctggcctcaagtgatccacccgcctcagtctcctaaagtgctaggattacaagcatgagccactgcacccggccttttttttttttttttttttttttttgagacagagtctcactctgtcgccaggctagagtacagtggcgcgacttcagctcactgcaaccttggcctcccaggttcaagcgattctcttgcctcagcctcctgagtagctgggactacaggcacgcaccaccacgcccagcaaatttttgtatttttagtagagatggggtttcaccatgttggccaggatggtcttgatctcttgaccttgtgatccacccacctcaccctcccaaagtgctgggattacaggcgtgagctaccacacccggctttttttttttttcctccaagtcagagtctcactgtgtcgcccgggctggactgcagtggcacagtctcggctcactgcagcctctacttcctgggctgaagtgatcctcccacctcaaagtagctgggactacaggcatgcactgccatgcctggctaatttttgtattttttgtagagacggggttttgccatgttgctcaggccagtcttgaactcctggggtcaagcaattcacccacctcagcctcccaagcgctgggattacagaccgctgtgccgggcctggcctgggttttgaaggaaaagtgggaggttgagaagcttggtagtgtcagaaccatgttccaaacagagggaataacatttgctttaaatttgttttaggaacatcaagtaattcattctggctgaggtgtggtaggcatagggcttgttggattttgaatataatcctaagggcactggggaagcatggagggtttcaagcagggaagaatatggacctatctgctttttaggaatatacctctggctgacaaatgaggggaggttgaaccctggaggcaggagcccaagggcgcagccatggcaggatccaaggacgcctggactgggctccaccagggcggggtcgtgaggaaatggggaagactgggggaacttgagaggcttcgtgtgcagggctttgtatatgggccacaggaccggtgtgctggaaggagataaagtttctaggatgaggcccaggactctggtttataatggaggactgtcactgggcccggtgattcatgcctgtaatcccagcactttgggaggccgaggcaggcggatcacaaggtcaggagatcgagaccatcctggctaacacgatgaaaccccgtctctactaaaaatacaaaaattagccgggcgtggtggcaggcgcctgcagtcccagctactagggaggctgaggcaggagaatggcatgaacccgggaggcagagcttgcagtgagccgagatcgcaccactgcactccagcctgggtgacagagcgagactccgtctcaaaaaaaaaaaaggaggactgtccccgaaacagggacctaggagaagcagttttggggagtacaagggccctacaaatgtcagggggaggccagcgacagtgtgggcgccattagtgcagaggtggaaactgagtggtgtgcgtgggtgtgacagccctgggagggcttgaacagtgagagaagacagggcctaggaatggctgcacttacgtcttaggtagtgtaagaagtacctagagctggtcaggcgcggtggcttgtgcctgtaactccagcattttgggagcctgaggcgggcagatcacaaggtcaggagttcaagaccagcctggccaacatggcaaaaccctgtctctactaaaaatacaaaaattagccaggcatggtggcgtgcacctgaaatcccagctacttggatgagacaagagaatctcttgaacccgggaggtggaggttgcagtgaaccaagatggcgccactgcactccagcctgggtaacagagcgagactgtctccaaaaaaaaaggggccgggcacaagtggctcatgcctgtaatcccaacactttgggatgccaaggcgggtagatcacgaggttaggagttcgagaccagcctggccaatatggtgaaatcccgtctctactaaaaatacaaaaattagccaggcttggtggcatgcacctgaagtgccagctcctctggaggctgaggcagaagaatcacttgaacccaggaggcagaggttgcagtgagccaagatcgtgctactgcactccagcctgggcaacagagcgagattccacctcaaaagaaaaaaaaaaaagcctgggcgcggtggctcatgcctgtaattccagcactttgggaggctgaggcgggtcggtcacctgaggtcatgagtttgagaccagcatggccaatgtggtgaaaccttgtctctactaaaaataaaaaaaaaattagccgggtgtggtggcgggtgcctgtaatcccagctactcgggaggctgaggcaggagaatcacttgaacctgggaggcggaggttgcagtgagctgagatcgtgccattgcactccagcctgggcaacaaaaccgaaactccatctcaaaaaaaaaaaagaaagtagtacctagagcagccagagaagcaggcagaaaaccaggggtgagatgccactgccaacaccaggcctggagccagggcagtaacaatgatagtagctaacagttcttggcactttaaacagtgtgccaggacccgtgcctgtgtctcatacacctgctctcactgttctcaccttatgaggtaggaagaggtggttattaaacccgttttccaaaggaggaaactgaggctcagagaagagtagccgccatgcccccaggttccccagcaaatgactggcagggccaacctctgactctaagacctgggaaatccagaggccaagccgacaacccccagctggcccttggggtggggtagaatgacctcgggtggagctgatgctgtccccttgcctgcctgtccacagcgcctggcgcatgagtgcctgtcacagagttgtgacagtgccaagcactctccaacgttggtgcccacagccaccaagcccgacgcagtgcagcctgacagcctcccctacccacagtacctggcggtcatcaaagcccagatttcctgtgccaaggacattcacaccgccctgctggactgtgccaacaaggtcacgggcaagacacccgcaccacctgctggccctgggggcactctgtgaagtgggggacagggagtggggcaggcagtggttggtgggtggtgtgcaaagggaatgaagagcgtcctgggcctaaacacagcagcctcctctcttcctgcctgagcaccgcagcgggagccagcagggggcagcagaggccaacagggagctcgcaggccgggcccctgcgtccctgccccttcttcctgctccccctcctagcctagggtagactttgaactgtgtgtgttgatgacttctctgttccacaggccctcccccattcttgcctgggtgtggagccctggctgtcccctctccctcagtccttcctgactgtctccagctgggaggtggtctctgtgtgccactcctctgtgtctctattacagttgtgtctctctcatcctgtctctttttcccttgtttctctgttcctgttaatgtgtttctccccatggtcctatttctctcactctgacctctctctcttagtcccctttagctgtcttctatccccagctcctaactgggactctgtgtctatgcagggggccagcacccctgggttatctggggctaagggaagggacttcatttccaggggccacagccaagcccagagtcccccagcggctcgcatgtcagcccagaccccagggtccttggcctaggagaggagcagtggaggggcccaggctctgagctccacaggtctgagcagggagcaactcaggcccccacccaagcctgcgtcagcggaacttgagtgaggggcgttgtgcaatttgtggcaaggctggcccagctggatgcctgggtcccagtatttttagccccaaaggagaagtgaaaaggccccagccggggtgaatcatcagtcctggggaagaacccaggcgcctgagccccagctccgggaagcaggcactggggagggggcttcaaggagggagtgccccctcagactccctgcttccctggaagcttcaggaagctcagcctcagccttcaggcctgagcaagtgcagggcggagctaccagcccaggctcagatgttggggtgtgaaagcctcaagtgactcagcctggttggagaactgccccacccagtatcttctgtgccatggttcccacattcgcactccatggcctcctgtcctggaccccacgtctgcaaggaaaccctaggaccatggatacctctgtgattcacgctgagcccaagtccccacactggaaaactgggaaatggccagctgtgtgtcccaggaaattcctccccttattcttccttgaagtgcccgagcatgtagggcaagaaggaaggctgaagcgctgtccctaggaggaatttctccttcaggggagcctcagttttgcccatttatctaattgaatcagttttttacccaatcccccgattttgtaggataatctcccttatctaaagtcaactgattatggactttaatcacatctacaaaacacttccatggcgacagctagatgagtgtttgaataactgggactgtagcccgtccaagttgacacataaaactgaccatcgggccgggggcggtggctcacgcctgtaatcccaacactttgggagcccgaggcgggcggatcacaaggtcaggagttcgagaccagcctggccaacacggtgaaaccccgactctactaaaaatacaaaaaattagccgggtgtggtggcacacacctgtagtcccagctactcgggaggctgaggcaggagaatcgtttgaacctgggaggcagaggttgcagtgagccaagatcacactattgcactccagcctgggcgacagggcaagactctgtctcaaaaaaaataaaaaactgaccatctagtccttgtcatctgggcaccctcacacatctccttaaccacacttaatctccaaataagtacgataacatagtcatagtcccacccaacatgatgcagttatcttgcatacaactgaagacaactaaccctttccccaacagagcccaccagcagtggtggagatgtcggtccatgagcgcacacacaagactgagggactgtcggccctcccaggtggtgtcaacacaacatcacacacaggtgggggggcctgatagcccagcacccatgatacagggcctaccaatgcttaaaaccacacccagggagcccacagaggcactcagtgggtggtggggtgatggatacacatctatcaggcacagggcggaggtgggcaccactgagttgcactcagcaaacacattgggtatcttgtgcccaaggcctgtatttgtggagctgatgttctagtgagagacagtaaatgtgacaaaagtaaaatatatcagatggtgagaaaacagaaaaatgagatcagaagtggagatgttggggccaggcacagtggcccaggcctgtaatcccatcactttgggaggtgcaggcaggcagatggcttgagcccaggaattcaagaccagtccgagcaacatagcaaaagcccttatctgcaaaaaattcaaaaattagccaggtgtggtggtgcgtgcccaggttcccaggtactcggaggctgagaggtgggaggatgccttgagcttgagaggttgaagctgcagtgagctgtgatcgcaccactgcactccagcttggttcatggagaccctgtttttttaaaaaaagaagtggaggtgtttacaccagcaaaatactcattttttaagtgtaattaagttgaagatcaaaaaatggaaatgtataattaaatcatacttagcaaatctaacacatgaaatgtaacatctgcatatggagaatcgtgttactttattgaaaaacattaaaagtttgagaacttaagttggattgtggtttcgtgagcattcattatggtttatatatgttccatgtatttattattaaatagatgacaagggttttcttattcttgtttatatatgtttgagaccagtctcactctgtcgcccaggctggagtgcagtgacgccatctcggctcactgcaacctccgcctcctgggttcacgtgattctgctgcctcagcctcccaactagctgggattacaggcgtgcatcaccacacctggctaatttttgtatttttagtagagacggggtttcaccatgttggccaggctggtcttgagcttctgacctcaagtgatctgcccgcctcggtctcccaaagtgctgggattacaggcacaggcacgagccactgcagtgggccttttaatttttgttttaatccttgacagaggtcaaggaaggcctcactgagaaggcgatattagagcagccccgaaggagagggaatgagcttggggacatccacacatccaggcaagagtgctccagacagagggaactgcaagtgccagggacctgggacaggaatgtgctgggatttatggaacacataaaaaggaggcttgggcacaatgagggagcagggataggagaggaaatccagacaggtcacagagggccttggtgaggacttgggtttgctaggtaactaaacccagagggagactacacagtctggtgcacactgcatgctccagggacggggtgtacgtgaggtgcacagccaccacaaaacagaccgtggggactccagcacacagcatgtctgccccactgcagagctaacccaccatcctacaatcatggtgcccccagggaccccatcccattgacagtcccacaaacatactttcagggagcaacccagccacatgaatacacaaacaaccctctaaccaccactttaccagataagctatctctcaccccatcgcagactttgcccatcacaggctgactcagccctgtccttagcccagcactatcagaagcagcctcatcggcgctgccccagcttctcaggtactcatgtctgcacgtctgctctgcccacagaggccgacacaagaacagtgacatggaggggggagctcgccagctactctccccatcacgcaggctgtagacgtcagaaaccaaagttcatcggtttctctgccttgtgactcgggccacaggaactgcattcagacgccggcctgctgtggtctgcacatgcagtctcagacacccacgacaaaggacgtggacatatgtgaacacttcacacacccagggactacacacactgagccacaaaggccttgcacacggccacagctgcagagtcacagatgctgacacagcttcaaatgtgtgtgccgggtgtggtggcacgtgcctttagtcccaactacctgggaggctgaagtggaaggatcgattcagcctgggaggtcgaggctgcactccagcctgggcaacagagcgagaccctgtctcaaagcaacacacacacacaaagttgtgtgtgcacacagcctcagtcacaggggagggcagtcattccctcacccaggcacctgcgcggagttacacacacttagtcactgcagatcccacagtggctcagagctacgcacagatatgcaggtggggatgaaaatctcatgttcttaagaatgccgcctcagagacaaattgcagtacagttacaacagagcatccaccccacacccagagatggccaaagtacacacggtacagtcgatcacacaggcggtttcacacattgattcacacagccaagtcatgcgggattgtatgcacacagccttctcacaggaaactgggcacactcgtgtccctcacgttcccccactgcatacccaggcacacaggctctcgcagccccagatgccaaggcgcacacctttgcacccgcaagcacacatactgttcacacaaccgggtacacatgacggctagcccaggcccgccgcccacgcagtcgcaggccagggtacacacggccagcgccgcccttggccacgcccgctcaggcccaggcaatcgcgccaggcgcacacacggcgcgagcacacgtgccgcgggtacacgatccccagctcgcccgcgcactcggccagctctcacacccccgcgtttcccgtccccgcttgtttttctggaaactctgctctcccctcccctccccctaggccggaagtgttggctgtatttttagcctctctggtttccgcccctttccttctttccccgcccgcccaggactggccccagcgccccgcggggggaccccggccatccccttccccaccgtcattccagaggggattcccggccgccgctggggccgcggattttcccgctggctacgtagggagcagggaggagtcctgccatgaacttccttctggcctgggacgcccgagatctgaggggagggctgagggcctggtctcctggatctgatcgaggacaggctgggggtctcccgggtctgagggaggaggagttaggggcctgaaccgctggatctgagggaggaggagatgggggcctggacccctgggtctgagggaggaggggctggggtctcgggggacctgaggatctgagggaggaggggctggaggcctggacccctgggtctgagggagggggggttgggagtctcccgggtctgaaggaggaggagttaggggcctggacccctggatctgagggaggaggagctgggggcctggacccctggttccgagggaggaggggctgggggcctggacccctggatccgagggaggggggtgctgggggcctggagtcctgggtctgagggaggaggggctggggacccagggccctgggttactgcgagggaggagggactgaggccttggctcctgggtcccccaggtctgtgggtttggggaggtggaggaccagtccttctgcgagcaaagcatccccctcctttgagagtggccctatcccaaaagtcctgactcttggggccgatgactcagcagatgggagagaggagggggacagcctgactcagggatgggaaatgctcccggtctccagggagtagaaactggaatccctcctccaggattgatcgcagcccgagctgagccgggctccgcgaacccaaggatgcccccaacccccctttccccgcctcaatcctttaagctgcgtaaggatttggagatcggcctagaggcgggtcccaggtccccctcctcccccctttttccccgttgtcctcaaggctctgtttacaggagacgggagccctggttacaggagaggaacccgagtgtccgggctgaacctcctcgtcacggcttccaggaagcccccactcccccgccccttgcgagtgagtcacgggcgagcaggaggccacaaccgtgccagagccgcccgcggcccgcccagctcacgagaccggcccgggaaggcccctcagcaagcgccgcaccagggattcccccccgccgctctcggacgaagcaggtcgacgtggagcctggcagaatctccccaccttaatacaagcccgcagcctgcaagaatgaactttccaccattataactgcgcactgtggcaatgatttctacccccacattttcactcagggcatccagctctccagcaccccttagaaaatagtcttcctagatcttaagagggttttcacttagggcgaccctttgataacaaaagatgtgccagtgtggggaatgatccttgaaaatgtagtctgggcggggtgcggtggctcacacctgtaatcccagcactttaagaggccgaggcaggtggatcacctgaggtcaggagttcgtgaccagcctgactaacatggtgaaacccccgtctctactaaaaatacaaaaattagctgggcgtggtggccggcgcctgtaatcccagctactcgggaggctgaggcaggagaatcacgtgaacccgggaggcagaggctgcagtgagctgagaccgcgccattgcactccagcctgggcaacaaaaacgaaactccatctcaaaaaagaaaaaaaaaaggaggcccggccggcttggtggctcacacctgtaatcccaccactttgggaggccgaggcgggttgatcacggaggtcaggagatcgagaccaccctggctaacacggtgaaaccccgtctctactaaaaatacaaaaaattagccaggcgtggtggtgggtgcctgtagtcccagctgctcgggaggctgaggcaggagaatgcgtgaacccgggaggtggagcttgcagtgagccgacatcgcgccattgcactccagcctgggtgaaagagcgcgactccgtctcaaaaaaaaaaaaggaaaatgtagtctgaaggcacaccccactataagagacccatccagccatcaactgaggatgacctttttttttttttttgaaagcttttttcaatcaatgcaaccatcagttatagtgaaagacctccaccttgccaatcttgagttttctcagagggcaaacctcgacataatttcagaccctagtatgaggcctgtgccatttgctagctcgaactaggagagtaactttatttttccccctgagagggagtctcgctctgtggcccaggctggagtgcagtcgcctgatctcggctcattgcaacctctgcctcctgggttcaagcgactctcccaccccagcctgctccctccccgcccccgagtagcgggaccacagggtgtgcgccaccacactcagctaatttttgcatttttgtagaaatggggattcgccgtgttgcccaggctagtctcagactccgagctctagtgatccgcctgccttgggcgcccaaagtgctaggactacaggtgtgagccgggcaggagagtaacttcactttggtttcctcctgccttaaatgggcataccacctggcattaggattaatgtgcgtaaagtacttagaactcagcccaggtgagttctccttaactcagcctagaagagatcatccgcccgagggtgagggggctagagccgccctgtgaattgggaaaggaggccccttttcagccttgccaggtatcctggaccccacccaacccactcactcacccacccaaccccagcaagtggggagagggagagcagtccaggtctccttatctgtctgggctgtttaggagtgagaccacacaaggcaggcagttctcagagaattcccctccaaggcctgctggctctttcttggcactttgctctgcagatttctttccgtaagtgcttatttctcacagtctttctcctttttgtccagtttctttttctttttaatttttttaaatagtattttttgtagacatgggatctcactgttgcccaggctgatcttgaactcctgatctcaggtaatccacctgcctcatcctctgaaagtactgggattggccgggcttggtggctcacacctgtaattccagctctttgggaggcggaggtgggaggatcgcttgagccccggagctggagattagcctgggcaacatagggaaaccccgtctttcaaaaaaaaaaaaaaagaagaagaaaaaggaaagaaaaacacaaaaagtgctgggatcacaggtgtgagccactgcgctcagcccctttctgtttctttttgtgatcctcccaaccctcttctccctctgaatctgtctctgggactgtctctgtctccccgtcttccctcccttcctcaccctgtctatctctctctgtatgtctcttggtgtgtgtgtctctctcgatgtttttctctctgcctgtctgcctgtctgtacccctctgcgtctctccccgcccccatccgtctgtgtcgcacgcgcacccccatcgggcttctgctcttgtcaattgcccctggggccctgcccccacctccgccccagtttccttctacaagcctcagtctccagctttgaaaactgggcaggcgtccccccatccgcacccccaccccttccccacgcattccccgctcggtcacggctgtccaccggccaagctcaggcgcgtcctggcccagggccgggcggaagggaaccagtccagggccagccaggctgcgccgggggcgcgcgtccgggaagcgcccctcctgccccgcccccggccccggccccggccccgccccgtgcttgcagtttcctataagtagccggctctcggtgccagcctcagcctgacttcagcgctcccactctcggccgacacccctcatggccaaccgttacaccatggatctgactgccatctacgaggtgagtccccgccgcacggcatccccggtacctgcatgcctgagtccgagtccccacctctctagcgccgcaaactccagcccgggacgcttgcctcccttctccaactggggctccctagcgccgcgccctccagcctggggcccctgcctcccgctcagaccagcttggtgatttggaggtgaaaatggaacccgcgacacccggctcttcgctcaaacatgggtggggcggcccatgcaagtggaaagtcggagaacttttctcagaccgaggctgcctggaggcggaagtggcccccatacctggctcacccctagtcgttgctgagggcgtggttttgcgcggaggcgtctctggggctgaagtctcagggtggggggatccgacttctgtctctccagtccctgaccgtagagacagagaaccctaaaaccgaagcaatccggacttccaggtcaactttgcccggtttctccagttgtgaaactggagatcccgacgcgtgggtcatatccggggaggacaagagacccaaaattgggaaacagtggtgcgccctgacttcggggtccccctcttggtccagccggggaagccgggattcctgggtccctcgggataaggcctcggtggtgggtaaactcagaacctccaactctgggttcctggcatccggaacccaggggtttctgcgggcgggtggggctcaggcggggagcccacaaaccggcctggcaagctctagttccctgcagctggggtggggcgtcgccctgcattttcaggtgccttaaccgacccatttccgcagagcctcctgtcgctgagccctgacgtgcccgtgccatccgaccatggagggactgagtccagcccaggctggggctcctcgggaccctggagcctgagcccctccgactccagcccgtctggggtcacctcccgcctgcctggccgctccaccagcctagtggagggccgcagctgtggctgggtgcccccaccccctggcttcgcaccgctggctccccgcctgggccctgagctgtcaccctcacccacttcgcccactgcaacctccaccaccccctcgcgctacaagactgagctatgtcggaccttctcagagagtgggcgctgccgctacggggccaagtgccagtttgcccatggcctgggcgagctgcgccaggccaatcgccaccccaaatacaagacggaactctgtcacaagttctacctccagggccgctgcccctacggctctcgctgccacttcatccacaaccctagcgaagacctggcggccccgggccaccctcctgtgcttcgccagagcatcagcttctccggcctgccctctggccgccggacctcaccaccaccaccaggcctggccggcccttccctgtcctccagctccttctcgccctccagctccccaccaccacctggggaccttccactgtcaccctctgccttctctgctgcccctggcacccccctggctcgaagagaccccaccccagtctgttgcccctcctgccgaagggccactcctatcagcgtctgggggcccttgggtggcctggttcggaccccctctgtacagtccctgggatccgaccctgatgaatatgccagcagcggcagcagcctggggggctctgactctcccgtcttcgaggcgggagtttttgcaccaccccagcccgtggcagccccccggcgactccccatcttcaatcgcatctctgtttctgagtgacaaagtgactgcccggtcagatcagctggatctcagcggggagccacgtctcttgcactgtggtctctgcatggaccccagggctgtggggacttgggggacagtaatcaagtaatccccttttccagaatgcattaacccactcccctgacctcacgctggggcaggtccccaagtgtgcaagctcagtattcatgatggtgggggatggagtgtcttccgaggttcttgggggaaaaaaaattgtagcatatttaagggaggcaatgaaccctctcccccacctcttccctgcccaaatctgtctcctagaatcttatgtgctgtgaataataggccttcactgcccctccagtttttatagacctgaggttccagtgtctcctggtaactggaacctctcctgagggggaatcctggtgctcaaattaccctccaaaagcaagtagccaaagccgttgccaaaccccacccataaatcaatgggccctttatttatgacgactttatttattctaatatgattttatagtatttatatatattgggtcgtctgcttcccttgtatttttcttcctttttttgtaatattgaaaacgacgatataattattataagtagactataatatatttagtaatatatattattaccttaaaagtctatttttgtgttttgggcatttttaaataaacaatctgagtgtaagctgggatcctggcttcttcgcggtctagagacaggaatggagagggagggggtgactttttggaagctgggtgcagttaactcttcctctccgagccccgcggcgcttacctggcaggaagtgacgtcaccgggcctggccgttcacctgaaagggtgggaccaggtgaggtcaccagatgggaaccgggggagccagttcccgggcgtcgggggcgccgcgctcccgtcctgctgggctccttgacccagcttcgggcgggtgcggtcggggacgggatgtttccgtccccacggggccgcgggaggcgggaggggccgggtggggaggacggaatgtgctggggcgcgcgcccagagcgagcgggggcgggcgcggggcggggcagcctggggtagcggaacccgtttcgggactagaggttccgggggggcttcgacaccttctggatgttggggaagcgggtttagggtctcaagaggctaggatctcaacatttgggagtcacaggttgcatcccctagcgctttagactctagacccctggtggctcggagttgcagatttctggccacccgggaccctggagcccgggaattaccgggtcttggcatttccgaaccttggaagtccgaggcttcgcacaccgaccagggtcggccccgcgaggccagggcgtgtgggtaggggccgcgcgtctaggaggggccccgggggagccgcgtcttcagaccatacaaggccagcgtcgtcgggaccaaccccggggccccgcgcccggaagccgccctgcgtcagcgcctgcggctcggccctgccgcccagccttcgccccctgcgacccctcttttttctccttgccccgcactcctccctcctccctctcacttccctcttctctcctttccctaccctcacccttcctcctctttttcacttcctcctctgcacccttctgccccgccctacaccctttgccttctgttcttctctccccctccaatttgtcccctccctcattactcctctcccacttccagcctccccatcctgccgtctcttaccccctttctcctccttcccgtctcccttctctccctttttccgtccttctttccctctccaccctttccttgccctcccactccccattgtcctcttcccctcctccccctagccttactccttctcctcttctctctccctctgaagcccctttccctcctctcccttctctctaccctcctcaagcctccctcctgctctcaggcctccttggcccactccccttgctcactgacatttggtctcctcttccaggaaactgcttcccttgtgggaaagggctcaggccctaataagtagaagaggatcaggcgagagggagtcagaacccctgagatgcaaaggcagcagaggggcagagaccaagagcaagcagtgaagagacatttgcagaaacagtcttggagactgaaagaacaacatctctggtccttcctttagccagatctgattctctgccccttccccaaaaaatccctcatataagaaaacggcacttctcaccatctaccagggcttaagccagacacccaggagtatcccttgacaccttgttctcaaatccacaccccagtccaacagcaatcctgtctgatccacctgcaaaatagatccactatccacctgcccccaccatgacccccaccctggtcctagccaacatcgtctgccatttgcatcttcatagcagccccagccccagtctctgctctagcccctgccttcagtctctcctttctccactcccccacgagacaaccaaaggaagcctgttatgagacctgagtcaggtcacataaaagtcaaagtccgaagtcctccccacagcccacacaatctggcacccatcgcttaccctcccccttggccactctgctccagccacactggcctcctagctgctctaccaagtctggtctgcttcatccataggagctttgcactagctgttccctctgcctgaacactcccctggtgtccccatggctcactcccctccttcatgtctctgctcaaaagttgccttctctgtgagatcctccctgaccactgctgttgcaatccacaccccacctccaactaccccatcctccctaccttgctcgactttttccatgacatttatcatcaccacctaacattaaaatgtacttaattcttatgttgacagcaatctgcctccccactagaatgtcgcgtcctcaggggcagggactacttgttcactgctgtattacacacagctaaaggaagccaggcatagtgaatgttcaatatttattgaaaaaacaagtcgactcaaaaacatagttttccttttcaacagaggtcgaaaactccaagacagatagctatgttcatctgtaaaggaggcattaaaaagacagagaaatacagaggaggcagagtcatatacagtttgccgaggacccacatctctacagaagtcaaactgtttgcacacaattccatgcccagagcatctaataagagacgatacccccacctggtggctgggacggaaacggcacctccctacaatacagaacacccaaaggaccgtcgccaaagccctaggagtcttttgagcccaataattcaaaagatagaaacgttcattcatctaagtgatgtagatgttttggttggtttattagatgtgtaagtttataaaaactgatggggaaaaaaagtgctccaggtgaggatcgaactcacaacctcggcattgctccgctcgcactgtcatataagtaccgcgcgctaaccgattgcgccactggagctccggccgcacccctgcgccggggtcttcttcagtggttcatagccacgtgacctcaccggagggccccgccttgtgttatatatgcaaattaaacattttgcattgaccaataggagacagtgcattgccagttccggattctcacgcctcgcggcccttgctgtaaaagggaaaagtccgcgaggcgtttggaatgtaggggtgtcgcctaccagaaggacacgcctcctcatgaatattcaaaacaaggggtggggtcttaacccttcgctggcgggtcggccggaaggcagcccctcccccccccgcaggcgggaacaggatgtgagccccggcgacagcgggggaggggaagccccgggcgaccgccccccgcctcacagctgggatcggactctcccgccccagatgtggcgccgccgccgtcacacgagccccgtgacacccagccgggagcccgaggggtccagaggctcggacccgggcgtccggaatttctgcaccgcatcctgagagaccccgaggtccagaccccggcgcccaggctggaggacttgagccatccaggtgcgcagcgccccctcctggagcagccgggagcccggacgtcaccccgcgagaccctggaggccgagcgccccgtatccccgtttcaagaactcaggatccaggaccgcagactccctccagggctccgatcccaagaccccgcgttggaggaacttgagatccggacttctaagcgccccaaccagtttcgggctgcagcggccatcgcttcaaggggacccaggactttgggacccccctgtgctcccacctggagggagtttcattcctgcccctagaattaggggaactcagaaatccatcccccaccccacggccctacctagaagacttaggaatgtgggtccccagcgccgccatctgagactccagagtcgaggctcctagcatcccctacgtagaacactgagaaattccgactgcgggaccccagtctccgagagaccccagattctattcctggagcctgagagcccgaagttcacgcccctgagtctgggctccgcacctccctggggaccgcgtcggggtcgcgcaggagccgggctgcctcgagccggggctggaggctccccgggaggtgaggggggaggcgaggggcccaggcggactgggggagggggcggcgccactgctgaacaatgagggggcgtgccggcggggggcgagccgaggcgccggcgggagttgggggctggaggggtgtgggaaggcgctggggaggctgtggctgtggggacggcgatcggggttcggagagaccggccggagggggtgcgagggctcggggccagcgccccagcgcgcagccctcggcgggggagggagccgtctgcaggaccctggcatccggtcccccagcctccgccctcccctgggaccccgcggcctcccgcccacggcttttcccagccctgcccctcgccctccgctccagctggagcccaaacgttcccaggatccctaagcctccggccccagacaaacgggactcgcagcttctgcgcctcctgctccgctcactcttctttgtctcagcctttccatctttttcgccaggttctctctccttgtccccttctttctgtcactttgtgcctcccccattagttactcccaggggcccctccctggatttacaccacgctcctaattcccagcccccatctgtgagtctgggcggcggagaggcccatggggtcctgatatccaagaaggggctctttctgcaggactctgctgggccgctcagccatgcctgagggagcccaaggactgagcctctccaaacctagcccaagcctcgggtgtggccgaagaggtgaagtgtgtgactgtggcaccgtgtgtgagactcggacaggtgagcctagaggcaggggcggcggagcctgtggggcttttattccttggcaatgctgtcaaggcagggtgatggagacaaccccaggccaactcgcacaaagctccgagtctggtggggaaggcgggcccatccccaggcaatgacaggccagagggggcagcgctgggcagagtggtcagggctgtgatcgtggatcctctgagctcggaaggtcaggggaaggttcctggaggtgggaacatctcaactgggaagtggaagattagggggaaggagttgcgcaaagacaaggaagagtattctacatgcaaggaacagcatgtgcaaaggcccagcggtgagaaaaggctgcatgtaagtgactgaaagaagttgagtgtcactggcatccagagtgtaagaagaggggtggctgtgggaagagaactggctagagggatctgtgttggccacattgcccagtgccctgtggatctgaggagtttggactttatccccaggggcatgaaggggttacactcacgggagtaatacagtcagatagacaaattaataaatgtctacctagctgattcatggaggtggattagagaaatggaggccagaagtccagagaggaccctgatgggagaggatgggactggaccaagacagggcagtggggagaggaggaaggagcctgtgggaaagctgttggacaggtgtgggtgagggtgtgggctgaacgcatgaaaggctgtggaagtccgtgcatggggagatttctctgacctcctgttccacaccccagcagctcctgcagcccccaccatggcctccccccgaggttctgggagctccacatccctgagcacagtgggctctgagggggatccagcccctgggcccactccagcctgctcagcctccaggccagagccccttccagggcctcccatccgcctacatctctctccggtggggatcccaggttcagccagaccctcaaggctggagcgtgtggcccgggagatcgtggagacagaacgggcctatgtcagggacctccgcagcatcgtggaggtaaggcgggcagacaccagagggcagtgggtacccaggccagccccttggcccccataaccccagtcatcccaacaggactacctgggccctctgctggacggcggggtcctggggctgagcgtggagcaggtgggcacgctgtttgccaacattgaggacatctacgagttcagcaggtcaggggcaggggggacaggcagggggcattgattggttggagggtctatttcctaatccaaacctcggagcttcgtagtgtcctgtccaggctggtacgtggggttgtgacattgggcaaggatcagggatcacgactgggagggaggaccccgagtgagggaggggcataggggatgggaggaccccgagtgagggaggggcatagcggatgggaggaccccgagtgagggaggggcatagcggatgggaggaccccgagtgagggaggggcatagcggatgggagtcagaggacctggatgaagcccaaacactgggacagggtcccggcatcaggacgagtccttggggctgtgtcaggtctgggctcacgatgaatccaagaatcatatggggcctgaaggccgagacagcgtgagcatgcgagtgaccccctaagcctgatttgcctgggacttttccagttttagcactgaaagccctcgtcctaggaaactgctcagtcccggacaaaccaggatggttggtcactgtggtaaggaggactctggggtccaaggatcatgacatttccaagtaccttgacgaggtctcgggattacagcaggaacttaagatcatcctagctctttgggtcatgatataacacccctaggctcatgccagcactgacacaagttcaagctgaggaatgagaagctgtccagggacaaagtctaagcaggttaccatgccccgtgtagccctcagaggacccttcctccggacatgacatccccttaggagatgctggcagtcagcaagcccccagccccagcagaccattggggcctcagcctcctggaggcctcccatggaggggtcgtgaaggcaggcggttcctcaccctcccctctcccctgtagcgagctcctggaggacttggagaacagcagcagcgccgggggtattgccgagtgcttcgtgcagagggtgagtggaggggtggggggctctcggtcctggatggggcctttgtagaggggggagagcaggcttgggctaggctggaaggggggtcgtgggaagccaggacctggggtctccctgactcccatgtcacccgcagagcgaggattttgacatctacacattgtactgcatgaactacccgaggtgaggggcaggagcccctgctgggcctcaggctgtgcccacaagctgatgtgccagtcacccgtcaccctccctctacccccgacccatccagcaccgacccctgccaggctgtgacagtaactgacctctccctcactgccccgccccctgtcagaccctgacccttcccaaaccctggcccctccctaacccctcttgaccccgcccactggaactgacaatccccactgacctgtgctgtgcccccagctccctggccctgctccgggagctgtcgttgtctccgccagcagccctgtggctgcaggagcgccaggcccagcttcgccactcgctgcccctgcagagcttcctgctgaaacctgtccagcgcattctcaagtaccatctgctgctgcaggtcagctggggcccctggagccaggctggggagggggaggtcctgtcccttgaccacctgttggttcatctggaggatggaccccccacgagttgggcaaggcctcccaaagtgctgggattacaggcgtgagccaccgcgcacagccctagcttttttttttccctttgaggtggagtttcactcttgtcgatgaggctggagtacagtggtgcgatcttggctcactgcaacctccacctcctgggttcaagtgattctccttgctcagcctcctgagtagctaggattacaggcgcacaccaccatgcccagctaatttttgtatttttaatagggacggggtttcactacgttggccgggctagtctcgaactcctggcctcaggtgatttgcccacctcagcctcccaaagtgctgggattacagacatgagccactgcgcctggcctctgcccctatctttatatttctccatctcctgttattctcattctctttctccttctctgtttctctccccatccctgcgtgcctggtggctgcctgacaggaactagggaagcactgggcggagggcccaggcactgggggtcgcgagatggtggaggaagctattgtgtccatgacagcggttgcctggtacatcaacgacatgaagcgcaagcaggagcatgcagcgcgcctccaggtggccccagggtgggctggggcttgctggatgagggagtgagcgagggggccttggggcgggtggggggaaatcagtgcctcagaggtagccttggagggttggctgggacagcatggccctgttgctaaccccctgttttggtgtgtatgtgtgtgccacctacccatgcttgtctctgcgccccggcgcacctggcggggtcccggcaggaagtgcagcggcggctgggtggctggaccggaccagagctcagtgcttttggggaactggtgttggagggcgcgttccgaggaggcggagggggtggcccccggctacgagggggtgagcggctgctcttcctgttctctcggatgctgctggtggccaagcgcagggggctggagtacacctacaaaggccacatcttcgtgagtttggggatggggtggggctagaatactacctacaaagtatatcccatatacctgtatctgtgtgcccggcagtgtgggccaggggaccctgccacattttcttgagttagagaatggaagccaagggaagctttctttctagtgtatagaatgagagctgccccacttaagaaaaaaaaggagaaggctgggcgtggtggctcattcctgtaatccgagcactttgggaggtcaaggcgggcggatcacttgaggtcaggagttcgagaccagcctagccaacgtggtgaaaccccgtctctactaaaaatacaaaaattagctggacgtggtggcaagtgcctgtaatcccagctactggggaggctgaggcaggagaattacttgaacccaggaggcggaggttgcaataagccaagatcatgccactgcactccagcctgggtgacagagcaagactctgtctcaaaaaaaaaaaagggagaggaaacccaccatacagccttatgggatgcatcttcctagggaggaggacccagatacacctccaagggtgtctccgtacaaggggcatcactgagcccaaggactctgagcttgctacccctctctttccttccagtgctgcaacctgagcgtgagcgagagtccccgagaccctctagggttcaaggtgtctgatctgaccattcccaagcacagacacctgctccaggtgagcatgtagtgggatcaggctggcagggatcccccagcctcgagacctcacacctggccccctgactctactccaacccactcctaggccaagaaccaagaagagaagaggctgtggattcactgtctccagcgcctcttctttgagaaccaccctgcctccatccctgccaaggtacagctcctgccgcagccgggggccctctgagtgctggagacaccctcccccaatagtactaagagacgcccctgcccaatgccagagcagtctgttataatgtgattgctaaaagtgcagaattccgctacttgggtttgaatcttagctctaccatgtccctgctttgtgaccttgggcaagtaacttaacctctctgagccttaacttcctcacctagaggaatgaaagcgccttcatcctagggttgtggtgatgagtaatggtcaccagccacgtcatgggcttgaccaatagaagcacccatcagctggctgtggtggctcatgcctataatcccagcacttcgagggggtgatgtgggaggatcatttaagcccgggagttcgataccagcttgggcaacatagtgagaccctgtctctaaaaaacattttttaattagctggggctggccaggcacggtggctcacacctgtaatcccaacactttgggagaccaaggcgggcggatcacctgaggtcaggagttcaagagcagcctgaccgacatggagaaaccccatctctactaaaaaatacaaaattaggccgggcgcggtggctcatgcctgtaatcccagcactttgggaggccgaggcgggcggatcacgaggtccggagatcgagaccatcctggctaacatggtgaaaccccatctctaccaaaaatacaaaaaattagccaggcgtggtggcaggtgcccgtagtcccagctactcgggaggctgaggcaggagaatggcgtgaacccaggaggcaagagcttgcagtgagcctaggttgcgtcactgcgctctccagactgggcaacagagtgagcctctgtctcaaaaaaaaaaaagaaaaagaaaaattagctgggcatggtggcgcatgcctgtaatcccagctactagggaggctgaggcaggagaatcacttgtacctgggaggcggaacttgcggtgagccgagatcatgccattgcactccagcctgggcaagaagagcgaaactccgtctcaaaaaaataaaaataaaatagctgggctggacgtggtggttcacgcctgtaatcccagcacttcgggaggccaaggcgggtggatcacctgaggttaggagttcaagaccagcctggtcaacatggtgaaaccccgtctctactaaaaacacaaaaattaccgggtgtggtagcgggcacctgtaatcccagcaactcaagaggctgaggcaggagaatcgcttgaacccaggaggcagagggtgcagtgagccgaaatcgcgcctttgcactccaacctcggcaacaagagcaaaatctccgtctcaaaaaaaaaaaaaaattagctggatgtgatggtgcacatatgaaatcccagctactcaggagggtgaggtgggaagatcgcttgatcccagaagtagaggctggagtgagctatgattgcaccactgtactccaacctggcgtatagagcaagatctaaaaacaaaaacagcacccattaatgggcatgactacggtgcttaaagtatcctctctgtggtactccaagatcgacccacctcagccctcatcctcctgtctttcaggcaaagcaagttctccttgaaaacagcctgcattgtgagttggggccttgggctgggagggtgtggaagtagacgaattacttccaagaaaaagttggcttttagccccaaaactctccccacaggtgcccccaaaagtaagcctgtcctagagcccctgacacccccacttgggtctcctcgacctcgagatgctagaagttttacccctgggcgaaggaacacaggtaaaggcggtggatccctgagtcccagccctcagccccacttccctaggacccgggagctgggctcacacagggctctggccctccctcccacagctccatctcctgggccctctgtgattcgccgaggccgcaggcagtctggtgagcactcacccctaagggtgatccaggcatcggggtgggagctgggctcctgacatcactgtgtcctccccgcagagccggtgaaggacccttatgtcatgttcccacagaacggtcagtgactgccccggttcagcctggtccatccctgtctgtcgcccggtgggatgtctggggcgggttggggaggggtggttgcttcagctcatcagttatgggggaatcactctttttcccttacatctcactaatgcttctctctctctcatctctccatccttagctaagcctggattcaaggtaagagatatctcgagatagggtctgggcaccttgacttctgggtctgatggagaagggagcttgagttccaaaatcctgggtctgaatgagaaggggattggggccagacagagtaactcatgcctgtaatctcagtattttgggaggtcaaggcaggaggattgctcgagcccaggagtttgagaccagtctgggcaacatggcaaaaccccatctctacaaaaagtacaaaaaaattagccaggcacactagtgcatgcccatagtcccagctactcaggagactgaggtgggaggattgcttgagcctgggaggcagaggttgcaaaatgagctgggacacaccactgcactccagcatgggtcacagtgagaccctgtctcaaataaataaataaaaattttaagagaaaaataaaaaaatttaaaaattgagccaggtacggtggctcacctgtaatcccagcactttgggaggccgaggtaggtggatcatctgagatcaggaatttgagaccaggctggccaacaaggagaaaccccgactctactaaaaatacaaaaattagctggacattgtggcaggcgcctgtaatcccagctactcaggaggctgaggcagcagaatcgcttgaacccgggaggcggagattgcagtgagcagagatggcgccattgcactgcaggctgggcgacagagcgagactccatctcaaaacaaacaaacgcaaaagaaggggattgggacttggggtcctctatgtgagggaggagtcttggctcttgccttccattgctttccctcctcacagcacgctggcagcgaaggggaactctaccctccagaatctcagccaccagtttcaggctctgcaccccctgaggacctggaggatgctggacccccaacactggacccctctgggacctcaatcactgaagaaatcctggaactgctgaatcagcgaggccttcgagatccaggggtgagctggctgtcccatcatggtgtccttgggcctctgggtgtgggcacacagaccagggaccagataggccagcccatgctgatacctttattttttttttatttgagatggagtcttgctctgttgccgaggctggagtgcagtggcgccatctcggctcactgcaagctctgcctcccaggttcaagcgattctcctgcctcagcctcctgagtagctgggactacaggcacccgccaacacacccggctaattttttttttttttttgtatttttagtagagacagggtttcactatgttggccaggctggtctcgaactcgtaacctcaagtgacccgcccacttcagcctcccaaagtgctgggattacaggcgtgagccaccacacccagctaccatgctgatatgtttggcttgttctcctgtgcccactatagccgtccacccatgacattcccaagttccccggagactcccaggtgcctggcgacagcgaaaccctcacattccaagccctgcccagccgggactcttcagaagaggaggaggaggaagaggaagggctggagatggatgaacgggggccttccccactccacgtcctggaagggctcgaaagttccattgcagctgaaatgcccagcattccctgccttaccaaaattcctgacgtgcccaaccttcctgaaattcccagccgctgtgaaattcccgaaggttctcgccttcctagtctctctgacatttccgatgtttttgagatgccctgccttccagccatacctagtgtccccaacacccccagtctgtctagcactcccaccctctcctgtgactcctggctccaagggcctctgcaggaaccagctgaggctccagccaccaggagagaactgttttctgggagcaatcctgggaaactgggagagccgccttcaggaggcaaggcagggccagaggaggatgaagaaggggtatcattcacagacttccagccccaggatgtcacccaacatcagggattcccagatgagctggcattccgctcttgctcagaaatccggagcgcctggcaggcattggaacagggacagctggcccggccaggcttcccagagccactgctgatcctggaggattcggatctgggtggagacagcgggagcgggaaggcaggagccccgagttcagaaaggacggcgtcccgagtgcgagagctggcccggctttacagcgagcggatccagcagatgcagcgggcggagactcgggcatcagccaatgccccgcgccgccggcctcgggttctggcccaaccccagccatccccctgtctgccccaggagcaggcagagccaggtgaggtccgggtacgtggttggcagaggtggtccccgctggagtagtggtcctgactcgatcctcttttcgcattcagggctcctgcctgcctttggacacgtgctggtatgtgagctggccttcccactgacatgtgcccaggagtctgtccccctgggtcctgctgtctgggttcaagctgccatacctttgtcaaagcagggaggcagcccggatggccagggtctacatgtttccaatttgcctaagcaagaccttccgggcatccacgtttcagctgctacccttttgcctgagcaaggaggttcccggcatgtccaggctccagccgccacacctttgcccaagcaagaaggccccctgcacctccaggtgccggctcttacaactttctctgatcaaggccacccagaaatccaagttccagccaccactcctttgcctgagcatagaagtcacatggttataccagctccatccaccgccttttgtcctgagcagggacactgtgcggacatccacgttcccaccactccagctttgcccaaggagatttgttctgatttcacagtttcagtcaccacccctgtgcccaagcaagaaggtcacctagacagcgagagcccaaccaatatcccactgacaaagcaaggaggttccagggatgttcagggcccagaccctgtctgcagtcaacccatccagcctttgtcttggcatggaagcagcctggatccccagggcccaggcgacaccctaccacccttgccatgtcacctcccagaccttcagattccaggtacctcacctttgcctgcacatggaagccacctggaccatcggatcccagccaacgccccactgtctttgtcccaggagctcccagacactcaggttccagctaccacacctttgcccctgccacaagtcctcacagacatctgggtccaagccctcccaacttcacccaagcagggaagcctcccagacatccagggtccagcggctgcacctccacttccggagccaagccttacagatacacaggtccaaaaactcacaccttcgttggagcagaagagcctcatagatgcccatgttccagctgccacacctttacctgagagaggaggctctctagacattcagggcctctcacccaccccagttcagaccaccatggttttgtccaaaccaggaggctccttagcctctcacgttgccaggttggagtcttcagacttgacgccacctcatagtcccccaccttccagccgtcagctcctgggccccaatgcagctgccctctccagatacctggcagcctcatatatcagccagagcctggctcggcggcaggggcctgggggaggggcccccgcagcctcccggggctcctggtcctctgctcccacgtcacgggcatcttcgccgcccccccagccccagccaccacctcccccagccaggcggctcagctatgccacgacggttaacatccacgtgggcgggggtgggcggctgcggccagccaaggcccaggtccggttgaaccaccctgctctcttggcctccacacaggaatctatgggccttcacagggcccagggggctcctgatgcccccttccacatgtgagccaggacatgaggcttccctgaagcaaggatttcagccagatgccatagaccctcagaacttgacctggaagtccagacactgaacgcaggcctcaaaactgctgcggccttccaactcctggtatctgcatcggcgaatggcccttcttgccttgatccacagggatggggaagggaggaatgtcattaatgttttgttaatactgattctttcatgcaatgatgtgtattttcccattctggaggctgtgggagatgacaagacaatgaatgggaaggtctgacacagaacaaatcagcggttctgaaagcttggggaatctcagactcctttgagaattattggaaaatggacccactataacttggcgtgtgtgtgaactgcttgatgcccatccaggaaagccaagttaagaagctttgcttcaagtagacactagaaatccattcccttggcaatttatacagttcacgtctcccaccatccgttcatctcacccaccctgccatctctccacctatccatctggctattgctccatctagctttcccgctccatctacccatcttccaatccatcatctcacgtatctgccttgcttatccaactgtctgccttattcacccacccatccctttatcattctaaccccatctggcattccatccctccatttatccatcttcccacttacccatcttctccatccagcactccgttcatcagtccgtctctccctccatatttccatctgtccattcatccactcattttgccatccatacatattcacccagccatctcccaatccatcgacataccccatccctccctcactggactctccggggtcttagtactatgatacttcagagacaattccatgctgatacgggggagatcaattttggggctctgggataagtctgtcccacatctgtctgatttcccttggcatccttcccgtcagttcctcttgaatatcccagttcttgtacccactcacatacctcagatcccttcactcctccccgcagtttgcagcctctacaattcatccacatgctccctcccccagcaaaataattcaggtcgtggagacaaaaggcttttatgttaggttctgtctgcccccttgttccagcagtggtatgcccagtgagaggcacaatttaaacggtttctttggtgatgatattagctactttcatcaaatacttagcctcttgtgctttagcacattatttatgtaagctcccctaggattctctgaagcaccctggtgtcctggctgtgaattcaagtcccatctttacttatttggtgtgggtcctccctctgagccggttttctcatctacaaaatgaagacaacagtacttccctcctgggatcattgaaagatttagggagcatatccttccacttcccaaacatatttgaacctctgacttgcttaggagcatcattcaaatcacagatcccccagtatctagtcccaacctattgaatcaggatccccagggaaggaggagcttgggaatctgatttttttttttttttttagataaagtctcactctgtcacccaggcttgagtgcagtggcaaaatcttggctcattgcaacctccacctcctgggttcaagcaattctcatgcctcagcttcccgacatagctgggattataggcgtgcaccaccatgcccagctaatttttcgttgttgttgttgttgttttgtttttgagacagagtctcgctctgttgcccaggctggagtacagtggcacgatcttggctcactgcaagctccgcttcccgggttcacgccattctcctgcctcagcctcccgagtagctgggaccacaggtgcccgccaccacgcccggctaatttttttggtatttttagtagagacggggttttaccatgttagccaggatggtctcgatctcctgacctcgtgatcctcccgcctcggcctcccaaagtgctggcattacaggcgtgagccatcattcctggctgggaatccgaatttttttttttttttagacggagtttcgctcttgttgcccaggctggagttcaatagcatgatctcggctcactgcaacctctgcctcccaggttcaagtgattctcctgcctctagctgggattgcaggcgcccacgaccacgcccagctaatttttgtattttgtagtagagacgggatttcgccatattggccaggccatagtggtcttggactcctgacctcaggtgatccgcccacctcggcctcccaaagtgttgggtttacaggcgtgagctaccataccctgcccaggaatctgaatttttagcaatcagttagcagcaaataagctgagatttcctgggtactaagcacatactatgagcattacagccgctttatataagctcgttcactgtcctcattacattcctaatatgcaagtgagcatgttttttaatcctcagtctagaggtgaggaaactgaggcaggcacagagaggctaagggatttgcctagtcgcacagctaggaaggtgcagcactgagactcgaatccacacagcttggcttaagtctaccattaaatttgcctgtcctggccaggtgcggtggctcacgcctgtaatcccaacacttcgtgaggccaaggcaggtggatcacttgaagtgaggagttcgagaccacaccagcctggccaacatggtgaaatcccgtctttactaaaaatacaaaaaattagctgggcgtggtggtgggtgccggtaatcctagctactcaggaggctgaggcaggagaatcacttgaacctgggaggtggaggttgcagtgaaccgagattgcgccactagactccagcctgggagacgagcaaaactgtctcaaaaaaataaaatgaaatacataaataaatgtgcctatcctgtgccgggtgctgttcttgccagtggggatacatgagagaacactgccttgcccgcatgaggcttgtggcctggtactgtgcacacctcaggggattctgataattagctgagcacagttgccagcacagggcctggctcaataaatattagctgctggcttctgctcacttactgtttattgactggctactgtacaccagggccgaggctgtgtcccgggggccccgtggtgacggaggtgaactcctcagcctggagtgatccactccactggagcctccccaaggtcaggaccgcagccgacgctcccctcctccgccccagctgcacattcccggctgaaggaaagttctcagcctggcccaggctcccagcggcgtcggaattcccggtattcgaggaggcagggagggagaaggggcctgtctactccaaggcctggagctgggaaggagaggcaagcccctttccagtccagatgtgtcccagctgtgcctctgggaaagagccaggagcctcaataagggggtctctggaccccctgggaaaaccatgggcgccaggcttgcctccacccctcctcctggcatctgtgaattccattcctccctcccgcccaactcctactgctgcttcccagccccagctctgtcgccttctcaggaatacctttcctgctggcctaccttggttctgagcccagtcctcctcagagctacagctaaatcaggctccgaaaggataaggatggtgcctgctgtcctctctgggacatttaggttaatgccagctaaaccagttaaccggagttaactctggctgcgatgcaaaacttggcgagccgcaaaacattttgccactagggtagttttctcatcctgtgtcaccaacctcacagggatgtggccacctccaacaaccacctacctgatgctccatgaaccccactcctttactttttctttttttttctttttttgaggaggagtcttgctctgtcgcccagagctgaagtgcagtggcgcaatgtcagctcactgcaacctctacctcctgggttcaagcgattctcctgcctcagcctccagagtagctgggactacaggcacgtgccactatgctcagctaattttgtacttttagtagagacagggtttcactgtgttggccaggctagtctcgaactcctgacctcaagtgatctgcctgcctctgcctcccaaagcgctgggattacaagaacgagttgctgcgcccggccccccactcctttactttttattttatttatttatttatttgagacggagtctccctatgttgcccaggctggagtgcagtggtgcgatcttggctcactgcaacctctgccgctggagttcagtggtgcgatcttggctcactgcaacctctgccgctggagttcaatggtgcgatcttggctcactgcaacctctgcctctggggttcaagtgattctcctgcctcagcctcccaagtagctgggattgcaggcgagtgccaccacgcccagctaatttttttgtatttttggtagaaacagggtttcaccatgttggccaggctggtctcaaactccagacctcgtgatccacccacctcggcctcctaaagtgctgggattacaggcatgagccaccgtgcctggccttttttcttttttgagacggacccttgctctgtggctcaggttggagtgcagcggcaaggtctcagctcactgcaacctctacctccagggttcaagcaattttcctgtctcagcctcctgagtagctgggactacaggcacacgccaccacacccagatagtttttgtatttttagtaaagacggggtttcaccatattggtcaggctggtctccaactcctgacctcaggtgatccacccgccttggcctcccaaagtgctgcgattacagatgtgagccaccacgcctggcttttttttttttttttttttgaggcggagtctcgctctgtcgtccaggccagagtacagtggtgcaatctctcagctcactgcaacctccacctcccgggttcaagccattctcctgcctcagcctcccaaacagctgggacgacaggcacccgccaccatgcccagcctttttttttttttttgtatttttagtagagaccaggtttcgccatgctggcaaggctggtctcgaactcctgacctcaagccatccacctgccttggcctcccaaagtgctgggattacaggcgtgagccactgggcccagcccccgactcattttatgtatcctgtgtcagtgctgtcccatataaccttccttgatgacggaaatgttctaatatgtgcagccccgcttggtagccatacatggcttctgagcactggctactgtattaactagggtagatacatagaaagtgggcaagtggacagaaaatctcaagttgtaaaacattccccctgagcatttaggtgcgggacttccctattggctgcagaggctggaactaggaagtagaaatctctgcgctccccaaacaatgaagttcactcgcttcctatgagtcattagccactcaacgaagtcctcacttaacgtcatcaataggttctgggaaaccgtgaccttaagcgaaacgacgtataaggaaaccagtttgtttaaaggactgttattacaggatctgcttgttttgcttaagtccgtttccaagcacctatacaaaacgctgaggatgcactgtgctttgaagcccaactcctcttccagcaccggcagcaacccttgcgtcatttgtgactccttgggagggggaagagggctgtggtcactcagtgccccatgacgagcacatggcccggcacaggtgttcaaggaaagtgaatgagcaagttgaggccacagacacccgaaaacaactcatcacagacatggtctccctggctactcttcctaccggccagcagaccctggttcccatgtcctctcccccaaggagtccacctgactcctccaggctgtcaggcaccgcttgagtcccacagcctcttgtgcttttcccacaagcggccaccctgactccttagctcctcatgttgaggggccacagggtagagatggggcctcttgagcagatctgtgacaacctaaactagtagtcaagaacctgggctctaggtcgggcgcggtggctcacgcctgttaatcccagcacttcgagaggccaaggcagggggatctacctgaggtcaggagttcaagatcagcctggataacatagtgaaacccacgtctctactaaaaatacaaaaatcagtcaggtgtggtggcacttgcctgtagtcccagctactcaggaggctgaggcagaattgcttgaacccggaaggcggaggttgcagtgagctgagattgtgcagctacactccagcctgggtgacagagcaagactccgtctccaaaaaaaaaaaaggcgggggggggggggcaggtgtggcggctcacacttgtaatcccagcactttgggaggccatggcgggtagattacctgaggtcaggagttccagaccagcctggccaacgtggtgaaaccgtctctactaaaaatagaacaattagctgggcaaggtggcaggcgcctgtaatcccagctactcgggaggctgagacaggagaattgcttgaacccgggaggcggaggttgcggtgagccgagatcacgccattgcactccagccagggatacaagagcaaaactctgtctcaaaaaaaagaaaaagaaaaaaaaagaacctggggtcttccacagcccggttacctgtccaaaatgccactttgggctcggcatggtggctcatgcctgtaatcccagcactttgggaggctgtggcaggaggatcacttgaggttaggagttcaagaccagccttgccaacatggtgaaaccccatctctactaaaaatacaaaaattaggctgggtgcagtggctcacgcctataatcccagcgctttaggaggcagagtcgggtgatcacttgaggtcaggatttcaagaccaaccttgccaacatgttgaaaccctgtctctacttaaaaaaaaaaaaattagctgggtgtggcaggcgcctgttcaagcaattctttccttcagcctcccaagtagctggattacaggcgcctgccaccatacctaatttttgtacttttaatagagatgaggtttcaccatcttggccaggctgatctttaactcctgaccttgtaatccaccagccttggcctctcagagtgatgggattacagtcgtgagccaccgtgcccgactctccttgttttctttgtattaaagattattggctaggcatggtagctcacacctgtaacctggacacattgggaagatgaggcaggaggattgcctgaggtcaggagaccacgcctgggcaacatagtgagacctgtctctacaaaaacaaaaattcagctgggggtggtggctctcgcctgtaatcccagcactttgggaggcccgggaaggcggatcacttgaggtcaggagtttgagaccagcctgaccaacacagtgaaacccatcgatactaaaaatacaaaattagcatggcgtggtggtgggtacctgtaatccaagctatttgggaggctgggcttgaaaaaaatagacatccacaaggatgagccatatatccgccaaggtctgcagccactaatggccccaaacgactgccatctcagctttgcctgcacactggactctactggaggtgtagagacagagaccccctgccttctgcttccactcacccacaccaagcccagcgcgaccacttctggggagggtcaaaatccagactggcaataggtccaggatgtttactgatttctgtctggttaaacatccaataccaacacataaggccacacacagttcttgaaactttaaaatccctcaaaaactgtttattatacaagtgagttttgagtcacgatgggcttatcggtaggatttctggtagcgagcgcgggcaccagggcctccaaactttttggactcgcagcgacgagggtcagctaccagcagggtccggtcatactggatgaggatgtctttgatctccttcttggaagcctcatccacatctggcaagaagagcagggacgaggatttagataatcacacagagtccttgacttgatccccacacacccatctacctcatgggaaggacccatgctcactcacatttctggtaataggccaccagggctttggagatggactgacggatagctgtgagaaagacacacaattaaagggtacaggagcgctgtgaaggcctccctcccagagccacctcctccatgcgcccagttcctgggactcaccataaatctgggccacgtgaccaccaccctttacacggacacggatgtctacaccagcaaatcgctccttgccgagaagcagaactggctccagcagctaaaggaatggggaatgaacagggatttaagttacatgctgggcagcttagccatctcactgggcttcttgtttctgtggcttctgccaccactggccttcaagtactagtggatgggggtcagggtgtcactccaaggccctctacagacccagagaagaggaaagtcaaaaaagccagatatgagactgctgaagtggtgttaagaaatataggcaaggtaaagggaacaagatctgggctccctcctacttgtgtccctcactggacctcagacaccctacctctaagactggttcttagaaggctgaacagtaaggagcattccaatagcttctgaaactcccaaggctgtttcaagtagtcgaaagccatccctggactgttcaggtgccttttctatttcccacctgagctctctgccctttctttgagcctcacaggtttccagaattacagtacaacctgtccctggtccctagacccttcccagctccaggtcttttaccagtgcctctgtctggatacttcctttacctgctttcagctcacaggtctccttccccagttctgaccactttggatcagcttctggtattgggcccagtccttctccccaactaggctggcaggtccatgaaggcaagaccttaagtcatctggatcactgctatgtccccaaaactcaacagagggtacacatacaaatccttcaaatacagtgacagccaataacagtaacattcaacatctgctacacaaaggaaatctcagaatttttattaaattctaggccaggcatggtgatcacacctgtaatcccagtccaggcagaaggatcacatgagaccaaggaccagcctgggcaataaagtgagaccccacgtctacagaaaaatatttctcaaatgagccaggcgtggtgatgtgcctgtagtcttggcaaccgaaaggctgaggtgggaggatctccaactcaggagtttaaggctgcagttcattaggattgtgctattgcactccagggtaggtgacagcaagatactgtttttaaaaaagaaccttataactcaaaaaaaatttttttaactgaccctgcaatgtagatattctttcttttaaaagtagtagagttcagaaggggcagaaatcagactctggtttctttccattctgagccaaagaaattgagagtcccaaaaagggaacagaggaaccccttttacaagcaagcatttaaacagacccaaattcggccgcacacggtggctgacgcctgcaatcccagcacttcgggaggccgaggctggtggatcacctgaggtaatgagttcgagaccactctggccaatatggcgaaaccccgtctctactaaaaatacaaaaattagccgggcgtggtggtgcatgcctgtaatctcagctactcaagaggctgaggcaggagaatcgctttaacccgggaggcgaaggttgcagtgatccgagatcgcgccactacactccagcctgggcgacacagcgagactccctctcaaaacaaataaataaaataaaaaatagtcggtgtcccttcaccctttgggtccccccgccccagtgaggtgagcttcctaacatcccagttctcaaagcaaacccttaatcttcaacaaccccatctcagcttttacatcttctgaaccccaagcccagctctattgccaaataccccactgttctacacccaacacaacttctaaacatcccgttgctgatgccagcccccccagctttcaagagctacaacatctctgtctccaagagtcctccatccactcaacgccggtgccggatcccagcaccttgtactgtagcgtgcgcggctcaatcatctccaggggccgcccgttcaccttgatgagaccattgccgcgtttgcagtgcgccacagctgtcgctgtcttctgtaagatacaagagaaacaggggccccgtgagctccggctccagctcccatgttaccccctagattcctgcccaccgacctctcccagaccctggccttctccttcccctccccttcccatccggcgtctggctcaccttgcgtccgaagacctgcacagactgcagcgggcccttggacggcatggctccgagcgtggactagacaacctcaccgcgcggcgccgcaaccggaaaaggaaagctaggggccaccctggccgcttttcagggtctgcgcaggcgccttgagcactgcgtcgcgacgggagagagctttacggcttctgttgcggctaacgggcggggcgtctggtcagcggcgggaaggcccttaggcgctcagagcgggcgggccctgtgaggcggaagtggcgggctctgtgggcggaaggggcggggcctgggagtgtcgtgtgcggactgaagggaaggctgcgggagtgtgcttcgcgtcctctgtagtcgactaccgcagctcttctttgcattctggctctttaataatctcccttcgccctttctttaaatcagttcccaccctcccaacacctgtaatctttctcccctctggactccctcctccccgaatcccccgcatcagaatcttcctttggaatctactgcaagaaatctggctggattctcagattaaggacttccagaatcctatcctccctagaatccccctccttggggatcctctcccagaatccttttcccctcagagccccttcccctcagaatctccctttcaccagaatgtccttcctttcagtttcctcttcccagaatgtttcccatccttctctcagatggccaaccccaaatgtccctcttaagagtgctcaacttagaccccccttttccctgaatctccctccattcggtcctcgtcccctcagtcacccttcccagaatctttctcttgtcaggacccagtacccctggaatctccctcctccagaatctccctttcccggcaaatccccctttcccggcaaatccccctttcccagaacaccccgccccgcaaatccacaaaaacttttctctcagagacccgtccctcaaaatctacctttctcctgagtttatttcccttccgagactcctcttcccagcaactgccttccctggagttttccctccgttagaatccccctctcctaagagaccctcccccaagaattaacctcttccccgtccccaccctagaatctctctcttttttttgagacggagtttcgctcgttgccctggctagagtgcagtggtgcgatctcgtctcactgcaacctccgcctcccgggttcaagagattctcctgccttaggctcccgagtagctggaattacaggcgtctaccaccacgccctggtcgttttttgtatttttagtagaaatggggtttcaccacgttggccaggctggtctcgaactcctgacctcaggtgatgtgatccgcctcagcctcccagagtcctgggattacaggcgtgagccaccacgcccggccgaatctctctgttttttgttttttttttttcttttttttgagacagagtcctgctctgtcgcccaggctggagtgcagtggcatgatctctgctcactgcaacctctgcctccccggttaaagcgattctcctgcctcagcctcttgagtagctgagattacaggcatgcaccaccacgcccggctaatttttgtatttgtagtagagacggggtttcaccatattggccagactggtctcgaactcctgacatcaaatgatccactcatctcagcctcccaaagtgctgggattacaggcgtgagccaccgcgcccagcccctagaatctctttctccagaatctcccagtcatctttttcctctcccccaaatcaccctccacttaagcctcctccccacagaattctccatccccagccccccaaccccacctgaggaaccccaggattgggttgtcctctggttccccggcagatgtccctgcgtctcaccccatcaagagtctccccagcgaagaggttcctctctcagagctagagggagcccacagttgcctcagtttctctggcagtacagggtctgggatccagggttcaaaagggcgtcgtggtgcaccttgccaaagagggtggagacagggagacactggagggcaggtctggggccagagggaaaagccagcccggagtccagctctaaaagggtgaggggggagggggctgttgggagggaggaaggaagtacccagaggctgaccgggagggacacagacacagcccaaagaaatgtaggcacaagtggagaagaagagaaagatgaaaggccaagggagaagaggaggagaaaagggagagaccaggacagtcaagagatggacccccaaaacaagcccagtgacagatttagaggcagagaggccaaccctcagacaaaaaagagataaaggcaggcatgatgtttccaaaatacttgagacagaggccaggtgcagtggctcacacctataatcccagcactttgggaggccaaggcagcaggatcactcgagcccagggttcaagaccagcctggccaacatggtgaaaccccgcctttactaaaaatacaaaaatcagctgggcatggtggcaggtgcctgtatcccagccacaagggaggctgaggcaggagaaccgcttgaacccgggaggcggaggttgcagtgagctgagatgtcgccactgcaccctaggctgggcgccagagcaagactctgtctcaaaaataaataaataaataaactctgtctcaaaaataaataaataaaataaaataaatagagcagagacctcaaatattcacttgcagacacagataaaggctagcacaggtgttttccaatgaagacacaggcagatgagaggatgcacacattctacctgtactttttctttttttttttttaaattgagatagagtctgtgtcacccaggctggaatgcagtgatgcaatctgagctcactgcaacctccacctccccggttcaagtgattgtcctgcttcagactctggagtagctgagattacagattctcctgcttcagactcctgagtagcccagatcacgggcctccaccactatgcttgactaataatttttcttttttttttttgagatggagtatcgctctgtcgcccagactggagggcagtggcttgatctcagctcactgcaacgtcagcttcctgggttcaagcaattctcctgcatcagccttccaagtagctgggattaaaggcatgcaccaccatgcccagctaatttttgtatttattagtagagacagggtttcactatgctgggcagactagtcttgaactcctgacctcaagtgatccacttgcctcggcctcccaaagtgctgggattacaagtgtgagccactgtgcctggccactaatttttgtattttttagtagagacagggttccatcgtgttggccaggctggtcttgaactccttacctcaagtgatccgcccacctcggcctcccaaggttctgggattacaggtgtgagccacagcggttggcctagcctgcactgtcttaagggcctgttgggcaggggagttcaggttctctcgtctctccagattgatcttcacacatttgctaagtctcgtatcgtccctgagcttgggagtcagggagcgctctgacctaagccctcctgactttggggtcaccatctttccccagcctctatgggcacactccctgaattatctgtggcttgagtggagcaagcaggggatgggatgaggggtggcgggggagttcccctcatccacttcagccttccagtctgctcccccttcctgtacctctctcttccagaaccccaggccaagcaccagagaaggcctgggagtgagcaaggtgcccatgttgcttctgtggatcatcctcctgcttgtacagccctgggagggcctaggaacgcccgcccctctgctggagggagcctttttacttccttgcagccctctgaagataccagcgagtggggagcagagccagcagacggggtgggccaattgatggggcgtggtagggggtgtgtttgaggaagggtcagcctctttccctccaagatctgattctcctccttacccctgaactgtaggaaaacaaaaatgatgacaccctctacaccccagatgatctctcagtgagtattgcattcgcttctttctgcagttgcaggttttgagagaattcagtggtctccatgtgtgagggctgctgtgtgaccatatgaatatgttgcggggaggaagtagtgggactatctcctgacccagcccctagccttgacagatatattttgctcactgctgtctccaacacctagaatagggaggtatataataacaaatgatgatgatgactacagctgcatgtaaatagtgtttactctgtgccaggtattggtttaaatgctttaagtatgttagcttatttactctgtacaccaatcctataagatagataggaccaccatgtatggatgtgaatgttgtacactgcacaaggatcccacatctacaaagacagtactatattcacaggctggatattgtagatttgcatatttgccaacttgcggcagatggcagtaaagtatcttgttctaataaaatcaagacttagaaggtagaaggaacttaaggaaggtctttttattttcttttttttgagacagggtcttgctctgtcccctacgctggagtgcagtggcacaatcacagctcactgcagtcttgaccttttaggctcaagcaatcctcccacctcagcctccagagtagctgggaccacatacacgtgacaccacaaatagctaatggctaattttttttttttttttttgagacacagtgttgctctgttgccagctggagtgcagtggcgtgatctctgctcactgcaacctctgcgtcctgggttgaagcaattcttctgcctcagcctcccgagtagctgggactacaggcatgtgccaccatgcccagctaatttttgtatttttagtagagacagggtttcaccatgttggccaggatgttctcgatctcttgacctcgtgatccacctgcctcaacctcccaaagtgctgggattacaggcgtgagccaccgtgcccgacctttttttttttttttttttttttgtagatatggggtgtcgctgtgttgcccaggctggttttggacacctgggctcaagtgatcttcctgccttggcctctcaaagagctgggattacaggcatgagccactgtgcccagctgagtgtctttttctagcttgcacataagtacagcatgggatagtgtcaggccttacggttgggattatccagagccctatttacagatgaggaaactgaggcccagagaactgaaggggtttgttccaggacacagataagaaatcttgggagtggggacttggactcatgcccttacccatagataccaggtcactttgtccctactgtgtgtcctgctgagactctaggctgctccaggttggagctgtctgtgattgggtttgaggagggaccatctatgggaactgctgtgttccagctacagtacctgctggatctcctggggtcccggctgtgggtggccagccagggcccttgcctgtcctgtgaaggacatccccagagacctgtccccctcttggagttactacagggagcttgtgcttggcaccctaccacagcctgagctttggaggacatgggctcccaggtacacccagagaggctgggtagagagagggagggaatagtcttcagctccaactgccaaaccctaagccttttcttccctctaggccagaggaccccacctggagccctagtagccaaggggaagagttaagaaggaggaaagtaaggtgcgatctgaagtctctgacctcttgggcagggagttggataaattgccccacctgcccccattctcaccctcctttagatactcttctctcttcttccaggaagggacagagaagtgcacaggtattctctaacctcatccctataccttgagaacagggagggtcctgtggttcacatccctacatccctggctacaaaaaattaccacttgaagaactttcttttcttttcttttctgtttttgaggcagagtctcactctgttgcccaggctagagtgcagtggcatggtctcagctcgctgcaacctccacctcctgggttcaagtaattctcctgcctcagcctcctgagtaactgggattacaggcacgcgccactacacctgactaatttttgtatttttagtagagatggggtttcacaatgttggtcacgctggtctcgaacgcctgaccttgtgatctgcccacctcagcctcccaaactgctgggattacaggcgtgagccaccgtgcccagcccaccacttggagaactttcaagtaatactgatggccagaccccagcccagataatttgataattggtctctggtgaagcctgagcatctatattatttttattattatttagagacagggtttcactatgctgcacaggctgtaacttggcatctgcccatatatttttttgagacagggtctcactctgtcacccaggctggagtgcagtggcatgatcaaaactcattgcaggctcgatctttcaggctcaagtgactctcccacctcagtcccccaagtagctagcgctataggcgcatgccaccacactcagctaatttttgtattttttgtagagatggggttaccctttattgcccaggctaatcttgaactcctggctcaagcgatactccccccttggcctcccaaagtgctgggattataggcatgagccaccacacctgacattttttttttttttttgagacagagtctccctttgtcacccaggctggagtgcaccggctggtggactggatggccacatttccatcaccccaaagcattccttctctctcttcccagtcaatttccacctccctctccagccccagacatccactaatctgcattgtctgtataggttggttttgcttgctctggagtttcatatgaatggaatcatgctggacatctcctgatgtctggcttctttcactcagcataatgttttggagattcagtcatgggtgtattggtagttgttactattctgttgcatggatggatgtaccaaaatttgtttttcttttgagacgagtctcactctgttgcccaggctggagtgcagtggtgcgatctctgctcactgcaaccttcacctccctggttcaagtgattctcctgcctcagcctcccaagtagctgggattacaggcgtgcgccaccacacctggctattttttttttttttttttttgtatttttagtagagatggggtttcaccatattggccaggctggtcttgaactcctgacttcgtgatccgcctgccttggccttccaaagtgctgggattacaggcgtgagtcactgcgcccggccctaatttttgtgtttccagtttagggctattatgcaactctttctttctaaaatattctcaagtattctgatgtgctaccagagttgagttcagaaccacggatccaccaaggaagaaacttccatggctggggaaatgactgtgccctcttttttctgcagggaatggctttctgcagcagtgtctgtagcgatttaatatgtagaatcctattttcttgttgtttttttttttgagacggagtcttgctcttttgtcacagcaacctccacctctcaagttcaagagattctcctgccacagcctcccgagtagctgggattacgggtgtgcgccactacgccacctggctaatttttgtattttttagtagagacagggttttaccatgttggccaggctggtcttgaactcctgacctcaggtgatccgcctgccttggcctcccaaagtgctgggattacaggcgtgagccaccgcgcccggtggagaatcctttctttttttgagatggagtctagctctgttgcccaggctggagtgcagtagcacgatctcggctcactgcaagctcggcctcccgggttcacgccattctcctgcctcagccttacgtgtagctgggactacaggcgcccgccaccacgcccagctaatttttttttgtatttttagtagagatggggtttcaccgtgttagccaggatggtctcggtctcctgacctcgtgatccacccgcctcggcctcccaaagtgctgggattacagacgtgagccaccgcgcccggcccaggtgtgtcatacttatgtgagaaattttaccaatgtgtcctgaggcttcttttttttttttttttttttgagactgagtctcactctcgcccaggctggagtgcagtggcgcgatctcggctcactgcaagctccgcctcctgggttcacgccattctcctgcctcagcctcccgagtagctagaatcacaggcacatgccaccacgcccggctaatttttttgtatttttagtagagacggggtttcaccatgttggccagactggtttcgaactcctgacctcaggcaatctgcccgccccggcctcccaatgtgttgggattacaggcatgagccaccgcgactgacatagacttctgatttttaaaatttcccctatcaggttaatttttcaatttttaaaaatttaagttttaatttttttttttttttttttttagagacagggtctctattacccagtctggagtgcagtggtgcaatcatagctcactgaagcctcaacatgggttcaagtgatcctcccaccttagcctttggagtagcagggaccacaggcacacgccaccacaccacattaaaaaaaacacaaaaattggatacatggggtctcaatttgttgcccatgctagtctcaaatacctggcctcaggtgatcctcccgcctcagcctcccaaagcgctgggattacaggcgaaggttcatttttcatctctccattacacctgtccactctgccatcactcgtcagccgtcattactaatagataaattcgcctttaaatgaacttaggaagcctggaaagaaaaatagggacttgggccgggcgcggcaggttatgcctgtgatctcagcactttggcaggacgaggccggaggatggctttttagtttgagttagaggagtttgagaccaggccgggcaacagcccgactctaccaaaaaaaaaaaaaaagtacaaaaagaaagaaaaagaaggaaaaaccagggcttcacggtcactcagacttggcgaggaggcttgggtctgccgctttccactgagtttttctgagcttcagcgttctctccaaaacggggatacggatctcctggggatgctttagagggcctaggagataaagccttgtttcttttataatttgctattcgctgatttcgccgcctcctcgcagcttggcctaccgcgctagtgttccggactaacgaacaaacggctcactaaattcaaacatgagtttcagcctggtcgccgagccggcgggtagaaaaaacctttcccctcctaaccctccgcagatgtcggccccgcactccgcccaggccagccctgcctctctcaagatggcgacctggaagtgcgtcgcccgtgccagccccggaaatctcgtgttaggcgaggtcaacgggtaggttctcgcgagaggacccgtcagccccagtcaggcgtcgtgcgaacagcagctggtaccgaaggcggaggtggagcccgagaggtaagtgcgtgtgcagaggtggcagttccgggcgccggggaggtgtagagaacagattcggaaactggggaggtctagcatgtggcgtaggagggggtcctcactccgcttcgcgattgccaaaacgagcctgccggaagcgccctaaggggttttcttctcccagggaaccagcggggaaactgaggctcggggtggagcgcaggattgtgggacgcgccaaggctgctgtctttcccagcagcagcggaagatgtcggacagcgaggacagcaacttttccgaggaggaggacagcgagcgcagcagtgacggcgaggaggccgaggtctgtggctggggcgctgggggagacattgcgtctggggacaggactccgggcagaaaggcccctgtgggaggctcgaggggttcacagcgggctctggcttctgggaactcccagattgtctcaagagatagagaattaggcaagtcgaagtcaagcaaagggacaggttctggaggccagaaatgggtcaggtccagtgagataacaggtgatgttttgaaagtttactctgtgtgcatatagtaagcacttagcattagtttttttttttagttatgtctagtcattccataactatatttgtagtgcctactatgtaccaggcgcaattctttgctcttagggtacaccagtaaacaaaaagattttaaaaatgtctgccttcgggaatgtaaataaatatagccaaggaataaactatatagtaagctggaaggtactctggagaaaagaacagaaaaggggaatggagagtcctggttgctcttgaaatagggtcatcagcatgagtctgaggggtgacatttgagcaaaaacttgttggaggtgagggagtgagtcgtggttagctggaagtgtagtgttccagtgagggggaccagcaggtgcagagatgggagtgtgtccgccgtgttcagggattaacgaggatttgagaggccaagctgggaggatcacttgagcccagaagtttgagagcaatctcggtaacacaacgggaccctgtctctacaaaaatataaaaaccattggctgaggccgggcttggtggctcacacctgtaatctcagcactgtgggaggccaagacagtggatcacctgaggtcaggagttcaagaccagcctggtcaacatggtgaaacaccatttctactaaaaatacaaaaaaattagcttggcatggtggcgcccacctgtaatcccagctactcgggaggctgaagctgagaatcgcttgaaccagggaggtggagactgtggtgagctgagatcgcgccactgcactgcagcctgggcgacgagcaagactccgtcttataaaaatattagctgagcttggtggcacgcttctgtagtcccagctacttgggaggctgaggtgggaagattgcttgagccagaaggtgaaggtctagtgagctgtgatggtgccactgcactgcagcctgggtgacagagtgagactttgtctccccaccaccccctaaaaaaagggggtccactttggttggatcagagtgagtgcaacaaagaatttatgagagccaagtcatataggatcttgaaggctgtggtaaggaatttggtcttaactgagtaaaatgaaaccacgaaaaagtttgagcaagtggaagatgtgatctaatgttttgaaaggatcactctggctttgggtctgttgtacctctgttccaggaaccaaaaaaccaacatttcctggggcatttctgatttcaaatgttcttttatttgccattatcttttttttttttttttttgagacagcatctcactaggttgcacaggttggagtgcagtggcatgatctcagcccactgcaacctcagcctcccgagtagctgggattacaggcatgcaccaccacatcaggctaatttctgtatttttagtagagacggggtttcactgtgttggccaggctggtcttgaactcctgacctcaggtgatccaccctccttggcctcccaaagtactgggattacaggcgtgagccactgcaccaagcccattatccaccttttaaacttatttttgttttatttgtttgttgaacaaatcagtgtttgcatctactactgtgttccacttacttctcaggtgtctggtaggaaatctttgcatttttggagttgacatttagtaggtagcaatcacaaaccagtaaacagatgacagggtgattatagatcccttgtttgatgcacagaaacttaaattggctgttaaattagttgccaatgcttgtgagggagatttaacataaagattaagatttctttttctggggaaatggaaggagctggcaccctgggacacagagttgttctgcagagcagccgtttgcttgatgagtggctgccctacttatacagctgggaattttctccagttcccaggatatgttagttgccatttgtcctcttgcttgccttgtggcagagtgaagaaaaggaaaagatttcatgtggctgtgttctggaaaacgtttggtagatggagagtgctgtgtgtttcgggtgacttgtcccagtcacttatgttgcctgcttatcctctgtggacatttgattgccaatctttattgtgacctttggagagtgcctggcttccaggcttgcagtgaagagttggagaaattgggatgctgtggtgggagagtgacagggagggccttttctctaagctgtagcactggattcttggtctctgattcatggcttggagacactgcttggtggttaaagtcaggtggaaatgagaccaagatccccagttccatttcctgtctgggacattctcgtttgcactgttactagtctcacttccccaacactacaccatacttgaccccccacccccgccgctggctcctcttcagttaccaggtgaggcaagagggcactgtgaggcctgtccccactgccagggacaggattggatggccttttcagacagccaaatgatgacatggtccttgaaggacagggttctgtggctagacaggtagggatggcaaataatgagctacttttgaggggagctgctggttcacccatcatggctccagtaacctgttcatttattcattcaacaaatgttctggctgggtgtggtggctcacgcctgtgatcccagcactttgggaggctgaggtgggtggatcacgaggtcaggagattgagaccatcctggctaacatggtgaaaccccgtctctactaaaaatacaaaaaattagcgtggtggtgggtgcctgtagtccctgctacttgggaggctgaggcaggagaatggcgtgaacgcaggagacagagcttgcagtgagcagagatcgcaccattgcactccagcctgggagacagagcgagactgcatctcaaaaaacaaaaaacaaaaaacaaatgttccttgacttggcatgttggggtcacagtctcccttacagagatctcagtctcaaggcagaggcagttttatagatacacagttactgcaggggatgttgaggacggtgagagcacatccaagccctgaggtgagcagagagtggtgggggcatcctccactgggagggaggagccaggtttggaaagaggcatctctgggacctgtcagaggggaactgatgacaaggttcctagaaatcagcctgtggtcctgtcatagtttgggttgttaaaatgtgcttcatcgtgggctagtcgagatttgtgttaagcaaatatttctgaagtcttctgtgcttggccttgggctgggtgatgttgggggacccagcagtgcctgagatggactgggccctactattgggaggctcacagtggtcagggctgtgatggagggagcccagagaattgtgagcatagaggatgtgcctgactctgcctgggggagagggggcggggatggctgcctggaggaggaaggttagtttggttttttttttttgtcttggtgtcttgctctgtcacccaggctggagtgcagtggcacgatctcagctcactgcagcctccacctcacggtcaagcagttctcctctctcagcttcctgagtagctgggattacagcggtgcgccaccacacctggctgatttttatatttttggtagagatggggtttcaccatgttggccagggtggtctcagaactcctgacctcaagtgatcgcctacctcggcctcccaaagtgctgggattacaggcatgagccaccacgctaagccttttttttttttttttgagacagggtctcactttgtcacccatgctggggtgcagtggtgtgatctcgactcactgcagcctcagcctcctgaggatcaagcaatcctcctgcttcagcctcccaatgaactgggacaacaagattttgccaccatgcctggttaagttttgtatttttggtagagacagggctttgtcagattgtccaggctggtgtcaaactcctgggctcaagtgatccttctaccttggcctcccaaagtgttgggattacaggtgtgagcccccatgcctagctaaggagggaatattttcgttgaagtgtgaatgggaggcacagttttttttttttggagatgaagtctcactctgtcgcccaggctggagtgtagtggcacaatcgcggctcactgcaacctcttccttctgggtttaagtgattctcctgcctcagcctcctgaatagctgggattacaggcgcatgccactgcgcccaggcccagaggggactttttatacagaaaaccagcatggatgatggccagcactgagagagtatggtccaagtagttgagtgcagctgaggcctagtgttggggaggcagtcctgaatggtggggaacggggagaggcagcaggcagagcatgtgcttctagttcaggctggctgaagctgagcaggggaacaaatggtcaggttcatgttttagattacagttttctaagactgtaccatatattctaggttggggatgatgaaaggtgcttttaggtggaataaggacaagaccttaagctacattgaatcatttagtgagaatatttccttttcagttgtgtgtcttatcttgattgggtcatgagaaagtttcatcttagtgctactgtgtcttgaacgcctctgggtgggagaacaggccttaggcttagagcctgcagcaggcagcagtatcttgctgggtcttaataacattgttttgcttttatctttatagttaccttgtgtttatgacaaaccttcaaaaagttttaaattttgaaacattgcataatataaaaatgtttttatttaagaaggtgagtagatttgaagaaaatacacattgagtattatctaaaatgcttgggacaagaagtgtttcagattttggatttttttttttttgattttgtaatatttgctgtggagcgttccctaatctgaaaatccagaatgctccagtgaacatttactttgagcatgacctttttttttttttttttttgagacagagtcttgctgtgtcgcctaggctggagtgcagtggtgcgatcttggctcactgcaacctgtgcctcccaggttcaaacaatcctcctgcctcagcctcccaagtagttgggactacaggcgtgccaccatgcctggctaggtttttttttttttgtatttttagtagagatggggtttcactatgttggccaggctggtcttgaactcctgacctcaggtgatccgcgcgagccaccgcgcccagcctgagcatgacctttgagcattatgtcagtgctgaaaaagtttcagattttgaagcctttcagatttcagttttttgtttgtttgtttttttgacagtgtcttggtccattggccaggctggagtgcagtggtacaatctcggctgagtgcaaccttcacctcccagtttcaagcgattctcctacctcagcctcctgagtagctgggagtacaggtgcccaccaccgtgctgggctagcttttgtatttttagtaaagacggggtttcaccacattggctaggcgggtcttgtactcctgatgtcaggtgatccacccgctttggcctcctaaagtgttgggattacaggcatgagccactgcacctgaccagatttcagatttttggattagggatgttcaacctgtattaggtaaatggattgtagtaatgacatggaagaagtcgtgaagttcatgagttaaagactgaagtttggtatgcatccattaatgttgtttctggtatggaaagagggattagaggccaggagagtagggaggaggctggggtaaggatccaggtgttagagggcagtgtcctggcctaggctcagatatatggggctgggggaaaaggatgggttggagaaatgatgtttacaggcagaaaggatgaggatttggtgcctgtcggtaattggaggaggccatcacaggtctaggggaagacactgaggtcagtttgggacacagtgagtatgaaagggctcagaggccatctaggggaggcatccaggatgctgctggtgcatggaggtcttgagttctggaaaaaagtgggactctatagacagatgaggacacgtgtcatctctagagacaggaactgaggtcatggaaagtaaaatggacagggagagagggcatggagggagaacaaagtggccctggactgagccctggtaattgatgtcagatttgaaggggttaacagtaagaggagcttgaagaggagctggtggagttttgagaaaaaccaggagagcatgatacggcagaagccaagagaggagcatttctccagggagggcatggttggggtgccagatgctgctgggatggtagggaatacagaatggccacagaattagcaacaggggtggccagtgatcttcgtgagcagtgtggactagaaacagagatgggagtcactgtcacagagatgtccaccaccgccaagggagaggacgagatggccttggggagttgtagaatgggaagagatgggccaggtgctgtggctcacacctgtaatcccagcattttcggaggcagaggcggatggatcacctgaggtcaagagttcgagaccagcctggccaacatggtgaagccacgtgtctactaaaaaaatacaaaaattagccaggtgtggtggcgcacacctgtaatctcagctactcaggaggctgaggcaagagaattgcttgaacccaggaggtggaggttgcagtgagccaagattctgccatggcactctagcctgggagacagagtgggactctgtctcaaaaaaaaaaaaaaaaagagagagaaagaaatgaggcccaaggaccaagcttcatcaagctattatagttaaagactcggtggaaagtgagcaagaggtctagtgcagggagaagcccgggtcaactcccagggttgcttgggtggctggggagatggcagtgctgtcgctgagataggatggtaaccagagaggccaggctagagtgaaagggatatatgcagagcaaagtgggctatgattggccaggccaatctgaggtcagatttagggtgaggaacttggtttttggatttttggggtagcagaattctggtgctacaaccctgcctgacccctgtaggtagacgaagagcggcggagtgcagcgggcagtgagaaagaagaagagcctgaggacgaagaggaggaggaagaggaggaggaatacgatgaggaagaggaggaagaagatgatgaccgaccccccaagaaaccccgccatggaggcttcattctggacgaggctggtatgtcatagtgcttggccagtgccgagcagaggctgagcttctacttttagttccatttctttttctttttttgaggcggagtctcgctctgtcgcccaggctggagtgcagtagcatgaacttggctcactgcaagttcatgccattctcctgcctcagcctcctgaatagctgggactacaggcgcccgccaccacgcccggctaattttttctattttttagtggagacggggtttcaccttgttagccagggtggtctcaatctcctgacctcgtgatctgcccgccttggcctcccaaaatgctgggattacaggcgtgaaggaccaaagttcttaacttttctcgtgctacggccccttctgtagtctggtgaaaccctgttcccttctcagaatcatcttctgaaatgcataaaacaaaatacataggattccaaagaggacaatttattgaagtacagttatcagaatatttaaaaagaacattttggtgcatatgtttctttgttaacatatttaggtaataagactttgtaggtagtctgagaatctaattttcaagtagcagtgagtgtaaatgctgccttgagatacctatagctgtaatgtgctgtgaaagagccagtgacacagctaacattgtgtggtttgttgccattgtatgtaattgatgtaaatgctaaatttcaattccaggttactgaaaataggagctgtagttttttcatcgaacacagaccaccccagatgaaaaatctctgttctacgtgttaaatccctgttagtcaaattgctaggtaaaggtggtgcattttgttgttgtcgttgtttttttttttttttttgagacggagtctcgctcaggctggagtgcagtggtgcgatggctcactgcaacctctccctcctgggttcaactgtttctcctgcctcagcctcctgagtagctgggactacgggcacgtgccaccatgcctggctaattttttatatttttagtagagacagggtttcactgtgttaggatggtctcgaactcctgaccttgtgatccgcccgccctggcctcccaaagtgctgagattacgggcgtgagccaccatgcctggccgcactttttttaaaaaaagattttttatatttacggccaaatatcagttcctaaaaagataagactagttcatacttccatgatgataatgaatgtgcatgttttcccttacctatgggaagaggggttacttagaacacatcctgcctctgttttcctgggactgttttacctgagaagaaaagtagtttattgtcaaagggacaggaggtgctctggatgttcttggagagcaagagaatggataccatgctgggtaaaagctgtgggttcccagggacacccatatgttggtggtggaagtgttggtgggcactgcctgtgtggaaggctgtgtggcagtgcctgttagcatttaacatgcaggaaccctttgaccaagcagttcctctttagaatttactttatggttaaacttgcatgagtgcatgaagacctgagaacaaagatgcttgttgtagtcctgttcgcagttgcaaaagtttggtgacctaaatgtttattgatgattagggcctggttaaacaaattatgggccatatagtatatgaggcatgtgctgctgtgggagagctctgagttagtagtagttttgagaaaaagaaaggtacagaacggtgtgttaaaaaaattacgtgggggctgggcgtggtggctcatgcttgtaatcccagcactttaggaggctgaggcgggtggatcatctgaggttaggagttcgagaccagcctggccaagatggcgaaaccctgtctctactaaaaatacaaaaattagctgggcgtggtggcgggcgcctgtaatcccagctacttgggaggctgaggcaggagaattgcttgaacccgggaggtggaggttgcagtgagccgagattgctgcactctagcttgggtgacagagcaagactcggtctaaacaaaaaaaattacatggggggaacatagtggtggcggggtggattacatgcatttcttttcttttcttctttttttttttttgagatggagtttcgctttttcacccaggctggggtgcagtggtgcaatctcagctcactgcaacctccaccttctggtttcaagtgcttctcctgcctcagcttcccgagtagctgggattacaggtgcctgccactacgcccagctaatttttgtatttttagtagagacagggtttcaccatgttggccaggctggtctcgaactcctgacctcatgatccacccaccttggcctcccaaagtactgggattacaggcgtgaaccactgcgccccgcctcttctttttttttttttttttttttttaagacggagtttctcttgcccaccctggagtgcagtggtgtgatctcggctcactgcaacctctgcctcccggattcaagggattctcctgtctcagcttcccgagtagctgggattataggcgtgtgccactaatttttgtgtttttagtagagacggggtttcaccatgttggccaggctggtctcgaactcctgacctcaggtggtccacccatctcggcctcccaaagtgcggggattataagcatgagccattgtgcccagaccttttttttttcttttttctttttttttttaaagacaggatctcactccgtttcctaggctggagttcagtggcatgatcatggctcactgcagcctctacctcccaggtccaagtgatcctctcacctcagcctcctgagtagctgggaccacaggtgtgcatcaccaggcctgactagactgtttttttttgttgttgttgttgttgttgttgtttttgagacggagtttccctctgttgcccaggctggagtgcagtggtgtgatcttggctcactgcaacctccacctcccgggttcaagcaattctctgcctcagcctcccgagtagctgggattacaggcgcccaccaccatacctgactaattttttgtatttttagtagagacgggggtttcaccatgttggccaggctgatcatgagctcctgtcctcatgatccacccgcctcggcctcccaaagtgctgggattacaggcatgagccaccgtgcccaaccctaactaattttttaagtttttggatttaggaggtctcactatgttgcccaggccggtttcaaactcctgggctcaagtgatcttcccacttcggcctcccaaagtgttgagattacaggtgtgagccaccacgtccagccttacatggatttcatatatgtacacagatatctctaggcaagaaactagtcacggagttgcctttgggagaggttactgagattctaggggttagaaatgtgagggagacttaattgatacttacatcctctatggacattggagtttttcattatgtgcatgtattacgtttttagtgtaatgtttgatacctgcaaagcagtacatccaacatggtaaagagattaagtacatggaccatggagccagactgcctctctcagatcccagctgagtctgtgggcaagttccttaatctctctgggtctcagagcctttgctgtaaaataggaacaacgatagtgcctccctcggggttgccaggaagatcagtgaggaacctgtgtcaggtactcagaacagggcagggtgtatagtatgctctcagcattagctgttataaatgtacaagaatcataaaaccaacagaccatgaaccatcttttaaaaaactatttattgatcattttctgatagttgggagggaacttttctttttgcttactttgatcttagttttttaaaagggatttgggagtggagtaaggagaggggatgacttttagagttagttggagctgtatgtccccctcgatcctgatgcgtgcaccagctctgtggcacggccccagacgagtgcctccctgttggagcctcagtgtcctgctctgtgcggtggggatttgtagtgcacatctcccagaggagatgcttcgtgtcctgggagctgttatgaggtcacctttgccacttaccacttggcctttccgttttagatgttgacgatgagtatgaggacgaggaccagtgggaggatggagcagaggacattctagagaaaggtgtgtgtgagccctgcctccacaagactactgggaagagggtggctgagagggtcttcagagcccattcccccgacccccgcatcccctgtacaccccaactcccaccgtcctcaccttgcttctttctgtccttcccagagagaccagctccctgctttttccttttaggcccatgagtggggggtggggccctggggtggggatgttgtggggagaggactctgggatcccagggcccagtgaatcccttctggggttgtagggtgggcgagctctgtcccaagataccccccacttcctgggccagtgcccccctttccccgttattttccgttctgtgcgcctcatacatttcggcttctccccaaccacctggtgcctggcctttacttttggttttcaacctttctgtgtccctcccttcccctcccccaacccattggttgattttgctgctataatttggctcatactttgtctgccctcgcccaccaccaccaccaccaccaccaccaccaccaccaccaccacctcctcttcctccaagtagaagagattgaaggtaagaatatgaaaagtgtgattccctgaccttcctcccatatcctgacatttcctccttcctgaggcacctgccctcaccggtagcctccccaccagccccggtctggccctgagggctctgacccatgtaggatccagagtcagggagttctggggccaggtataccccagttgttgacctgggaaagcacggatgtgtctgtctgggactgagcatttgtgggtggtagcgatgtgtggggtggggtgcagtccagggtgtgcctggactttgagatgggaacagctggaagccccccaacttgctgggccccatccccagtctttttgacaagaagcaggatgctgagtaggacagagtaggggatgaggggttgggatttcctctgtgagatgtcatcttcctgccccagggccaaaccctggccctcttagctgcacgctcctattttctccaggcccctgccctccacctgcccttgctcacgccctctgcccattatttttcagcctccaatatcgataatgttgtcctggatgaagatcgttctggggctcgccgcctgcaaaacctctggaggtgggcaaggaagggaaacgtggtgggattggctcctgtggggagatttgggagtaggtcagcccacctgctgtcctcaaccttcaattcgtgtttgcttccccactcgtgctccagggaccagcgagaagaagaactgggcgagtattacatgaagaaatacgccaagtcatctgtgggagagacgtaagggcatggtgggggcaggtgggggcagggagcaggtggtccctaagcgggaaggggcggggatctgacagagcttcaccccttcctgactgccctcctcccttcagggtgtatggaggatctgatgagctctcagacgacatcacccagcagcagctgctcccaggagtcaagtaagggggttgggatggtgggggccgtgctggggtgcgaatcttgtatggggtgatggtgcctagacaggtggctccctgaaataagtcagggcagagtcacacaggcagtgtggtggatggcaggggtagggagggcaaggtggcactttctctttcctcttgctcctgggtagaagcgtggggaagtcagtgagtgtgagggaacctggatgtgaaaccagaggaagggggtggccctgggggttcgtctgtttgttactgaagatccagcttcactgaaggccttccttttcctctgctgcttagggatcccaatctgtggactgtcaaatgtaaggtatgtgctctgatctcggggcttggaggaggtgggagaatgagggaggctgctttgtgggggagaagtgtctgtctgtcccgggtctccgtggcctgccagtcacttggtccttctgtctccatccctcactccacgttactgactggctatctcccacctccatcttcctggctgtccatccttctttctctctcctctcttggtcctactttatttttcttgctgctgtctccttccccctttcctgtgtcctttcctccatcctgtcatctctctcaaatctgcctctcatcttccagattggggaggaacgggccacggccatttccttgatgcgcaagttcattgcctaccagttcacagacacggtaagtcgggtagacaggcggcttggtggggagacatggcaacacccagagggaagaacattgtcaacttcaggggtaccaggtgcctctgttgtgagcagagctgcctgctgagtgagctgcttgagctggaataagaccactgcctagatggaagggctcttctcggcctagatggatatgttgtctttgttctctgcatttatggcagggtcttcccacccttgtagccctttggaagtcagccagctagcttcctgcaccttttcttcatgagagtgggtttgcctgttcaccagccctgttgggctggggtcacccacttcaccacatgccaggcagcaaatgctgcatccaaggcccaggtctttctttagactgacagagtttgagtcctgcccttgccacttcttagctgtgtgactctgatgcacctacttcccctctctgggccccttggttgcctctcagcatcattaggattaagtggcttttggctgggtgcagtggcattcacctgtaataccagcactctggaaggctgaggcaggcagatcacttgaggtcaggagtttgagaccagcctggccaacgtggtgaaaccccgtctctactaaaaatacaaaactcagctgggcgtggtggtgcacacctgtagtcccagctacttgggaagctgaggcagaatcacttgaacccaggaggcagaagttgcggtgagccgagatcgcatcactgcactccagtgtgacaaaaaaaaggattaggtggctttatgtccagctctcagctaggacttgttctgcagcttgcatttacttagcagagctgttgtcaaaggcttcattggcagtttgggaaccagggcaaacgctatgaagggtgctggctggtaactttctcagttaacatgatccctgctagggatcatgctttcacctgtccagccactgggtgtgacccagtgggaccaagtagacagttgtagggtttgcaaactatgcttttaaatgtgctcaaatgtcctcctcaaaggccggccatggtggctcatgcctgaatctccagcacttagggaggctgaggtgggtggatcacgaggttaggagttcgaaaccagccagtttgagaccagcctggccaacatggtgaaaccttgtccctaccaaaaatacaaaaatcagctgggcatggtggtgcttgactgtaatcccagctacttgggaggctgaggcaggagaatcacttgaatctaggaggcagaggttacagtgagccaagactgcgctattgcactccagcctgggcgacagagtgagactccgtctcggggtgggtagggggtggaatgtcttcctcattattatagtaataagtgtccctgcctgtcatgggtgagattgggatttgtggggtatgattccccaacagggaggttgaaaaggtaccttttggctaggtgtggtggctaatgtctgtaataccagtattttgggaggctgaggcaaaaggagttcgaggccagcctggacatcatagtgacatagtgacaactgatttctacaaagaaaataataataggccgggcgcggtggctcacgcctgtaatcccagcactttgggagactgaggcgtgtggatcacctgaggttaagagttcgagaccagcttcaccagcatggtgaaactccgtctctaccaaaaatacaaaagattagccaggggtggtggtgcatgtctataatcccagctacttgggaggctgagacaggagaattgcttgaacccaggagttggaggttgtagtgagccaagctcgtgccactgcactccagcctgggcaacagagcgagactgtctcaaaaaaaaaaaaaaaaaaataataataataataattaaaagaagtgtgctcaaatcctcctacatggtaccctggggtaaaattctagttacttcatttgagttatgtctctgattattatttttttttgagacggagtttcactcttgttgcccaggctggagtgcaatggtgtggtctcggctcactgcaacctctgcctcagcctcccgagtagctgggattataggcatccgccaccatgcccggctgatttttttgtatttttaatagagacggggtttcaccatgttggccagcctggtcttgaactcctggctcaagtgatccacccgccttggcctcccaaagtgctgggatggcagttctgagccactgtgcccagcctaaaatttaatttttttaaagtgtaaactgtggtggattttatatattgtagtgtattcataaccatcatcaccatctaattccaggacattttcattatcccaaaaataaaccgatacccattagtcatcactccccattcctccctcctcacagctcctggtaactatgaatctaccttctttctctgtggatttgactattggaactctgaatggttcatacaaagggaatcatacaatatgtcgcctttcgtgactgacttgcttcacttaatgttttcaagactcatccatattgtagcatatatcaagacttcatttttttgtttgtttttttgagatggagttttactcttcttgcccaggctagaatgtaatggtgcagtcttggcccactgcaaccactgcctcccaggctcaactgattctcctgtctcaatctcccaagtagctgggattacaggcacccgacaccacgcctggctaatttttgtgtttttagtagagatagggtttcagcatgttggccaggctggtctcgaactcctgacctcaggtgatcggcccacctcggcctcccaaagtgttgggattacaggcgtgagccactgtgcccagccttaattttcttttttttttttttttttgagacagagtctcgcaccgttgcccaggctggagtgcaatgatgcgatctcggctcaccgcaacctgcacctcccgggttcaagcgattctcctgcctcagcctcccaagtagctgggattacaggcacccaccaccatgcccagctaattttttttttttttttttttttggtatttttagtagagatggggtttcaccatgttggccaggctgaccttgaactcctgacctcagatgatccacccctcagcctcccaaagtgctgggattacaggcatgaacccactgcgcctggccaaccggccttaatttttgtatttttagtagaggcaaggtttcaccatgttggccaggctggtattgaactcccgacctcaagtgatcctcctgcctcggcctcccaaagtgctgggattacaggcatgagccaccgctcctggccttttttttcttttagttggtatttacagctatacatttacttctaagcatggcttttttcaaatctcataagttttggtatctaggagtgtgttgccatgtatttgtgaatttcctaagtatctttctgttggtttttaacttcattacatatggatggagaatatactttatatgattttagttcttttatgtttactgagacgtgttttatggcctaacctgtggtttattctggaaagtttaatatgcccttgagaagaaagtgcattctgctgttgttagatggagtgttcttttttcccatttccgcttaataagtggaaagtgaagacgaaatgttctgtctatagctggctattaggtttaggtggcttacagtgttgctcaagtgttctctttccttgttgatcttgggtctagctctatccatgattgaaagcagggtattgcagtcagtgattgttactgttgagttgtcagtttcttccttcattttcattagtttctgcttcatgtattttgaggctctgttagtttcatatacatttgtaattctatcttcctgatggattgacctttttattgttacaaaatgttttttgttgtctctggtagcaatttttgtcttaaagtatattttgtctgatgtaagcactcctttcttggttcttcttctagttgctttttttttttttttgagacggagttttgctcttattgcccagactggagtgcaatggtgcgatctcagcttaccgcaacctccacctcccgggttcaagcgactcttctgcctcagcctcccgtgtagctgggatgacaggcatgtgccaccacacccggctaatcttggatatttttagtagagacagggtttctccgtgttggtcaggctggtcttgaactcttgaccccaagtgatccacccgcctcggcctcccaaagtgctgggattacaagcatgagccaccgtgcccggctctagttgcttttttacacagaacatatgttggatagctttctatattagtacatacaggttaatctaatttttattttattttttatttttaagagacagggtttcactctgttgcccaggctggagtgcagtggtgcgatctcagctcactgcagcctcaacctcccgggctcaagcagtcctccctgctcagcctcctgagtagctgggactacaggcatgtgccatcacacccagctagtttttgtattctttaactgcaacattgtatttcatggtacattaagccataagttaactagttactgtttctggatatttttaaaatttttagtctggtttgtttgctgtgataaataattctgcagggaacacctttgtgtccatgtcattgtgccagtgtgtttctgtggaataaattcctagaagagggactgctgatgagtggcagtcatttctgttattagccgttgtgtctcactgtttcctccttccaccggctcaccctgcagcccctgcagatcaagtcagtagtggcaccagagcatgtgaagggctacatctacgtggaggcctacaagcagacccacgtgaagcaggccattgagggggtgggcaacctgcggcttggctactggaaccagcagatggtgcccatcaaggagatgacagacgtgctcaaagtggtgaaggaggtggccaacctgaaaccaaagtcctgggtccgcctcaagcggggcatctacaaggatgacattgctcaggtgcccggggcggggtggcatgggggtcagggtccctccattctgttctcccttcctttccttttgtccttcccaccctctttgtgctgcagagaatagaatcccactcagatgagttgaagcagagcctgggttttgtgagcacacaggaaacggttggctgtcttctgtgcacattcccaggcgtgttgagtaaaggtctgaaggatcggagggcgtgaggcatgtggagctcttggggaggagtgttgtaggcagcaggagtggcctgtgagataggatggcacagtcactggctacagcagggatggcgtgagatgagttagggagctcacgagggcctgcggcccattggagagctttggtgtttactggcgtaggatgggagggctgtaagggacacaggcagacttcaatgttaataagatttctctggtgactgtgttgagactagaccactggttctcaagccagggtgatgtttccccaggggacatttggtaacgtctggagacatttttggttatgtcagctggggagggggttgacgattatggcatctagcaggttaaagccagaaatgctagacacacacatcctccaatgcacaggatggctgcccacaacaaaaaattacctggcccaaaaagtcaatagtgccaaggctgagaaacccgggaatagcctggagggggccatgggcaagagcgtggagaccagggaggaggctgctgctgtagcacatcccacccagatggcagtgctggtgggataggaccaagaccctaatacacgttgagtgtctctaacctgaattcttgagaccacaggtgtttttcagatttcagattttttcagcttttggaatatttgcattatacttaccggttgagcatcccaaatctgaaaatccaagagtgagcatttccttcgagcatcatgttggtgctcacagggtttcctatttttgagcattttgggtttttggatttggaatgctgagactgcagtggaggaggggaagaggtcaggtattttgaaggcagagctgatggaatttgccaacgggtcgggtgtgggtgtaagagaaacaaaggagtcaagagtggctcccaggttgtgtgcctgagcagagggaagaatggagtgggaggcggcaggtttgggggaatcagcggtttggctgcggtcgtcctggatttgagggacctttagacatccaggtggagataccaagcaggcagtggctactcagtgccagagttgaggggacagacaagctagcgtgggacttttgggagtggtcagcagcctggtttcttccccaccatcctgcgtcccttctccttcctagcatctcctgacccttcttgtgtctggggtcagggaggagagtggggccctgctgaccttctgctcgccctgctcaggtggactacgtggagcccagccagaacaccatctccctgaagatgatcccacgcatcgactacgatcgcatcaaggcccgcatgagcttggtactcaggggaatctgtggcctgggggggagggagtgtgctcgatcccactggtggccaagccccctccctcacccttcccacccatgcccctttcctccatagaaagactggtttgccaaaaggaagaagtttaagcggcctccacagaggctgtttgatgctgagaagatcaggtgcgtgtccttggggactggctgggctgggtccccagggccggtgtgtagaatgtgccttttgcaggttcctccccaggggtggccccgccacaggtttagcctgtgaattggttagcttggcagtatagcctcaggcaagtcacttcacatccctgtgcctcagtttcttctgctataaagattgatgaggctgggcgcagcgggagggagcactttggaaggctaaggcaggaggcttgcttgaggcaaggagttcgagaccagcctgggcaacataatgagatcccatcttttaaaataataataataataaaaagaaaaaagttaaaaaaatatttaaaaagattgatgaggctgggcgtgatggctcacacctataatcccagcgctttgggaggccgaggcgggcggatcacttgaggtcaggagttcaagaccagcctggccaacatggtgaaaccttgtctctactaaaaatacaaaaattagccaagggttgtggtcagctcctgtaatccaagctacttgggaggctgaggcaggagaatcgcttaaacccacgaggcagaaattgcagtgagccgagatcgtgccactgcactccagcctgggtgacagagcgagactccgtctcaaaaaaaaagaaaacaacctctgcttcctcagattatagattatagtgagaattaaataaattagtatgcatatgtactcagaatgcccttggcacgtagtaagtgtgatccatggtgtgatatattgaaatgggattcatggactatgtcaggctttagaaagtctcctttcctgatctgcttatgcccacttgagatgggggggtatggagtgcctttccctcaggatgccccccagactccctagctgggtagagaattggagcagcccaggaatttcaacatcccagggccaactgggggctccggcagggagggcaggagaggaggacatggagaaacgagaggtgccagtgacactcttccctctggtcctgttctagaactaattgtgtgtgattcagccagtcaggttttccttcagataaaggaagagctgtggaatgcacctttgagtctgcacccaagggccttgctaatacttcacctgcctgagttcggacccatttataccactggtttcgactcacctgaacctctctttgcaaagaacaaaccctagtgctcccttaccccccagcaagccagctgaccaagtaccccagcatgcccagcagagcatgctggcccctctcccagattcaccatgggagaaggcgattgcatgagcgcaggaggaacttgacctgctcctccatgaaggaggctccttccccaccccggagactcggaacaggcactaagcggccgccactccacatttggggccgggagctgcaggcttgggagtcccacctgcctgcttttgaatcctgtcaagactgtggcttggcacccttgggcatgtgatgtgaccttcctgagcctgcattccctcacctggaaatgatgagcagttactgatgccacagatttggggaagagcctgtgaggtcatgagtgtgcaggccaggctgagcgctctgcgaatattcactggtatcattgtctgaaactgttattttgttcagctaatgtttactgcatactttctgtgtactgggcactattcttggtgaaatttagtgaatgttacatccctgaccttctggagctgacatgctagttagggggacaggtcaaacactagattgtcagatggtgatcggtgctcaaagataaatcagggaatgggtggaggagtgcagggaggtgggaggcgggcctttggggtttgtgagaagtcactgctgccaagagggtgtgtgctgggatgggatgggtcagtctgcctgtggtcctctccttctgttgccagctgagaagactgaggtacagcaagattttcttcttgactctcccttctaatcttctctcccccatcaaattccaggtccctggggggtgatgttgcctctgatggtgacttcctcatctttgaggggaaccgttacagccggaagggctttctgttcaagagcttcgccatgtctgctgtggtgagggtcccagaggggtgttggtaatgggggtggtgtgagtgttctcctgcaggtgatgccctgggctgtgggttatctggttctgtcccactcctcaagttaggagtgttccctaggagaattattcccctaggacccactcagcccactcagctgggctgttgcactgacctcggtccatttccttctcttcccctcaccgctgggggcttagatcacggagggtgtgaagccaacactctctgagctggaaaagtttgaggaccagccagagggcattgacctggaggtggtgactgagagcacaggtatttgatccccctctataacctgggccaaggagcaggggcggcccatggtggcaacccccgagtcagccctacgactgcccctgcagggaaggagcgggagcacaacttccaacctggggacaacgtggaggtctgtgagggtgagctcatcaacctgcagggcaagatcctcagcgtggatggcaacaagatcaccatcatgcccaagcatgaggacctcaaggtgggtgcccggtgttctcgggcaggggttggagtgttcaggcacatctgactgtatgtggctgtcgaggcggtggtgtgcctggtgacacctggtttccaggagggtaagttgaggcccttctagcattctcaggtgcctgagaggctctgtctgagtgcagctcagggtcggtgggcagcaggcctgcctggtggtgtctgtctctggagagtgacttggtctatcttttgtttctgaaaagcaagatatctgggtagtactgggttgagagtgtgattaaccaaggagtaatctgaggcttgactttgtttgcttagagcggggtgtgtgtttgtctgtgtctggtgtatgtctgaggggttgtgcaggcccagtgtgatgtgtggggtgaggctgtctccgggtggggctgaggagctgtccagtcgggggtcctgtgtctgaggggcaggctctctgtgtgggtataggtaggcatcgtgtgtcttgagggcgggctggggtaaaggttgtccaggttggtgtcctgtgtctggggtcagctgtttctggggcagtctgaggggtcgtccaggtggactaaggtagtctggggtgggtggtaagagcctgaagtggggtttttgagaacatgcgtagattctgaagacaggaggggcaggcaggttgtggtggtctcccttcacctgtttgttgtccccacacccaatcccccaggacatgttggagttcccagcccaggaacttagaaaatacttcaagatgggggaccacgtgaaggtgattgctggccgattcgagggcgacacaggcctcattgtgcgggtggaggagaatttcgttatcctgttctctgacctcaccatgcatgaggtaggtggatagaagggtcggggaagggtgcacgtgccaagaggagacccaggtaggcgagccacctggactgggcctcacccctttcaccatccctggcagctgaaggtgctcccccgggacctgcagctctgctcagagacagcatcaggtgtggatgttgggggccagcatgaatggggcgagctggtgcagctggatccccagactgtgggtgtcatcgtgcgactagaacgggagaccttccaggtgtgtgtgttgtgctctgtggcggggacttgcttttaggaggcttcctgtccctcaacccctcatcctgggaggtggcagagcccccagactgctctgggttgcagatctggctctgtcacttacatctgaatggctgatagtgggcacatggcaagtcattgatccctccccttgcctgttttcacaccctataaaatggaaacgagagcagcgtctactttgttcatagtgaatgattccctgaggttagatctgtaccctggtggctgttgctcgctcaaggatggagtgccacatgtgccctcctgcctttgctccttcctcatggatgtgggagtcatggagcacagtacttaggatcctggactccacatccacatcttggctttgttgctcctgtgctgtctgaccctgggctagtgactcaccctctctgagcctgagtttccctctgtaagatggaaatcatgacagaatccacctcagaggaagttttgaggcttcagtgaaatcttacggggcctgacacagaatgatggatgaacaatgttgctatcagccccttcttccatctctcaggtccctgttgcccaatcgggggtggagtctccttccaaagggtgttttagaatgactgggaacatttttggttgacccagtacctaaagggtggcactctgcctgcctgccccgcagccagggaattgagatgccttgtggagcttgggactgtctcccacaaggaaggattatcccactttagggaacccctgccccgtgtctccccttcccattctcacccccacagcctccctgctctccctctgtaggtgctgaacatgtacgggaaggtggtgactgtcagacatcaggctgtgacccggaagaaggacaaccgctttgctgtggccttggactcagagcagaacaacatccatgtgaaagacatcgttaaggtcattgatggcccccactcagtgagtacaagttcctgcttttgagctgcatctgaaagaatttggttggttgggggtgagggggacatggtcaagagagtgacccttctctccccggctagggccgagaaggggagattcgccatctcttccgaagcttcgccttcctacattgcaagaaactggtggagaacgggggcatgtttgtctgcaagacccgccacctggtgctggctgggggctcaaaggtgaggtgggcatggcaggaccctgtgcgttgggtacctggctcagctctccaagcctcctctggccccagaagtgataagattgggcttgtgagggattaggagagcagtgtcattgtcaggtccttggcaaagagtgagaaggtttatttgggattctgagctgttcaccaagttattttaagttatttattcatttcattttactgagcacctgttaggtgccagacactggagaaccagtggtgaacaagacaaaaatactctgctctcacagagctgatactctagaggtggacagacagataaacccatcgtacagcttgaggtgatagcaagcgctgtgaagaaaacagaatgggctcaggagacagggagtgaccagggctgctgttttagacagaggagggtaaaaaaggcctcagtgggaggcagtattggagcagagacctgaatgaagggatggagagtgagcattttgggggaacagcaagtgcaaaggccctgaggtggggcttgtaggaaagtgtgcaggaccagctgtcacagaggaattcaggcctggggtgtgggtggctgggtggtctcctcagggccctgcacgtgggatgatgagttcctgtggtttgtggttcccccatcccctgcctgccagttcactccttgcttctatcctagccccgtgatgtgaccaacttcaccgtgggtggctttgcgcctatgagtccccggatcagcagccccatgcaccccagtgctggaggtgagaggggttcagggtcaggggatgtggtgggtagaaggggctggaaggaacttggttgttcagcctacactcactgagtgcctgtgctgggctgggcactgctattaggggttcaccacccacaggagggtagacgccacagtgacagcccagaatggtcagggcttccataggaaagccatggggcaggggtgggcagaggaggctcttaacccaagtagggaggagtcaagcaagtgaaggggacgttctgatggtgcccttgctgtgggcacagccgtgggggaccagtgacattctccccaatccccaggtcagcgtggcggctttggtagcccaggtggcggcagtggtggcatgagcaggggccggggccggagggacaacgaactcatcggccagaccgtgcgcatctcccaggggccctacaaaggtgacctgcgaggcctgtggaggcctggggaggggcatggtgaaggagagcctgcccagcctgacctcctgtccccctgcaggctacatcggtgtggtgaaagatgccacagagtccacggcccgtgtggagctgcactccacctgccagaccatctctgtggaccgtcagcggctcaccacggtgtacgggcggggcctggggagggccagggtggggcttgctaggcagtgagaggggtctgctcaccccatttgttctctgcgtccccaggggctcacggcgcccgggcggcatgacctcgacctatgggaggacgcccatgtatggctcccagacgcccatgtatggctctggctcccgaacacccatgtacggctcacagacacccctccaggatggtgagtgcccgcaggggacagggaagaggggctagggggacctagagaagggacaggacagacacactcatttcccccattccaggtagccgcaccccacactacggctcacagacgcccctgcatgatggcagccgcactcctgcccagagtggggcctgggaccccaacaaccccaacacgccgtcacggtgagtccagggttccccaggttctggtgtgtgctggtgtgtgtgagggatgatgctgggtgtctggggcattggaggggtttgtggggcccacccagcattctctgctcctagcctcaggctggtccctttgaaggaggaggcatagcatggcggggcgggggcaaagcggcctcctctccatccccaacctcagtagtgattgtggttacccttgggcctggagaaagactgcctgggtggagtgaccttgggagggcaccctcatctctgtcaaccacagtgtcagctgtggaagggaaataacatcaggagtgcctctggatggggctcccgtgagaatgaaattgcttcagttgggggtctggtgtagggtgctgttctggaagcatccatcgcattatcaccacagtcgctgtcaacagacttttctcccaacagggctgaggaagaatatgagtatgctttcgatgatgagcccaccccgtccccgcaggcctatgggggaacccccaatccccaaacacctggctacccagacccctcgtccccacaggtcaacccacaatacaacccgcagacgccagggacgccggccatgtgagtccactggggcctgccctcgtctacccctgcccaaaccctcctactgccaccacctcttttcccctccctcctccaacaaatgcccccttctctcctgtctctgcaggtacaacacagaccagttctctccctatgctgccccctccccacaaggttcctaccagcccagccccagcccccagagctaccaccaggtggcgccaagcccagcaggctaccagaatacccactccccagccagctaccaccctacaccgtcgcccatggcctatcaggtaatggtctgcctgcctgccctgaagggtggtgggctagggtgactttgggcatatagggtcggccaggccagatgactattcccaatgacacttcctctttcccctgcaggctagccccagcccgagccccgttggctacagtcctatgacacctggagctccctcccctggtggctacaacccacacacgccaggctcaggcatcgagcagaactccagcgactgggtaaccactgacattcaggtgaaggtgcgggacacctacctggatacacaggtggtgggacagacaggtgtcatccgcagtgtcacggtacgtggggcccagggtggtgggtgagcaggcatcctctccttggtaccccctaaactggagacagacctgtccccagatggtgacagcccagagtgggcagagctgggattgaggaagcctagagggcaaggggagctatgtgaacccaaaggaggcatcttacctgatttagcggggaatcagggagggctgcctggggaaggagaaatctgagccaagacctgacaaatgaataggagtaagctaaggaaagtgactggggtgagtgagttccaaatggagggaactgcatgtgcagaggcctggaggtgaggggaacctgggcacattccaggagctgaagggtttgttgtggctggaacataaagagccaaagggggccaagcagtgcttcacacctgtaatcccagcactctgggaggccgaggtgggcagatcacctgaggtcaggagttcaagaccagcctggtcaacgtggtgaaaccctgtctctactaaaaatacaaaaaaaaaaaaaaaaaaaaaaaaagctgggcatagtggcgcatgcctgtaatcccagctacttgggaggctgaggcaggagaatcgcttgaacccaggaggtggaggttgtggtgagccgagatcgtgccactgcgccccagtctgggtgacagagcaagactcctcaaaaaaaaaaaaatggtgagtgatgaggccagagagttggctggggccctgtcatgcaccagcctggaggacctagactgtccagagggcgccggagagccatgaaggaatctaagcaggagaggggtgggagcagatctgtggtatggaattctccatcagtgatggattgggggtggggagactgggctgggaccccagggggaggttgggctgcactggggcagggctgtggggaagaggcaggaggcaggtgggagagaccctcacgggctgaatggccaggcctcagagctaggggcttgttggtgagggaggtgaccaagatgaggtccagagctctggtggggcctgcagaccatggggcggtccctgagaccaggtccaggaagaggagcaggtgtggggaagacgctgaggccagtttgggacatgaagagtcaagaagcagtctcctttttgcctgttagcttcattctgatgcttcccttgctgattgggtcaccctgtccaccctgacatgcaccacaggccccaggccttggaaccaggcccagccttggcctttcctgcccccatttcaccttgagttctcagaatgagccctgagcctgtgtcccctggagtatgggcctcagtcccatgttgggagcaggacaggctgaccaggctgtccccatcctccaggggggcatgtgctctgtgtacctgaaggacagtgagaaggttgtcagcatttccagtgagcacctggagcctatcacccccaccaagaacaacaaggtaagggcagggggcaaggagataagatggggccgttgggtgctgacatggaccctgaccatattccccccacccccaggtgaaagtgatcctgggcgaggatcgggaagccacgggcgtcctactgagcattgatggtgaggatggcattgtccgtatggaccttgatgagcagctcaagatcctcaacctccgcttcctggggaagctcctggaagcctgaagcaggcagggccggtggacttcgtcggatgaagagtgatcctccttccttccctggcccttggctgtgacacaagatcctcctgcagggctaggcggattgttctggatttccttttgtttttccttttagttttccatcttttccctccctggtgctcattggaatctgagtagagtctgggggagggtccccaccttcctgtacctcctccccacagcttgcttttgttgtaccgtctttcaataaaaagaagctgtttggtctaaaagtgcgtgtgtgtgtgtgtgtgtgtgtgtgtgtgtgtgtgtgtgtgtgtatgccgtgggaatgagggtgttgtttttaagtggggtcatttgcagaccccacttccttgctttgtggttggggcaaataactggaccctacctaaatctgttttcccatctagataatagtgatagtgcctgccccagagagctcttgaggggagtgtgtatgagaagacgtcggaaggagatgatcagagtagagcttgtcatgtgattgatgacattatatcttattcaggcatgaattatgctaagtgaaaatcacagtatcccccaggaaacctaaattcctcctgtggtgcaggatacagtgcttgatggtcctttttctttgttttctctttatttttatttttttgagatggagtcttgctttctcaccaggctggagtgcagtggcacgatcttggctcactgcaacctccgcctcccgggttcaagcgattctcctgcatcagcctccccagtagctgagattacaggcgtgcaccaccacacccagcgaatttttttgtattttagtagagacagggtttcaccatgttgaccaggatggtcttgatctcttgacctcgtgatccgcccaccttggcctcccaaagtgttgggattacaggcgtgagccaccgcacctggccttttttttttttttcctcccctgagacagagtctctctctgtcatctaggctgaagttcagaggtatgatctcggctcactgcaacctgtacctcctgggttcaagcaattctcctgtctcagcctcctgagtagctgggattacaggcgtgagccaccacgcctggctattattatttttttttttttgtacttttaggagagacgggtttcaccatgttggccgggctggtcttgaactcctgacctcgtgatccgcccgcctcggcctcccaaagtgctggtattacaggcgtgagtcactgcacctggccaatgatccttttttttttcttttctgtttgaggtggggtctccctctgttgcccgggctggagttcagtggtgcagtcattgctcactgcagcctcaacctcctgcgctcaagcgatcctcttgcctcagcctcctaagtagctgggactacaggcgtgtgccaccacgcctggataatttttttatttttaagtttttcatagagacgggtctcactatattgctcaggctggtctcgatctcctggcttcaagtgatccttctgcctcggcctcccaaagtgctgcaataacaggcgtgagccacagtgctcagcggtcctttttcttgaaccctgatagcagtgacaccaggattgctgtagttcatccaatgacttgggggcaggagtgagtgcaatcttagagactggggcttagtacccagaacctgtttcccttcctcgttagatattcctgtctttttacaaatgtaaatgtattataaaacatttcaggccgggcgcaatagctcatgcctgtaatcccagcactttgggaggccgaggggggcggatcatttgaagtctggagtttgagacgagcctgaccaatatggtgaaaccctgtctctactaaaaatacaaaaaaaattagctgggcatggtggcgggcgcctgtattcccagctacttgggaggctgaagcaggagaatcgcttgaacctgggaggtggaggttgccgtgagccgagattgcaccaactgcactccagccagggtgacagagcaaaactctgtctcaaaaaaccaaaaaaaaccaacaacaacaacaaaaaaaaacaccaaaaaacatttcagacgttcaagattatataccaagaacaccaatgtccccatcagccagctgaggaaacaggaaacaatatgtactagataggacccacttcagcagcaccctaaatccattcccccagaagtaaccaggagggccgagttccttgtgtctttccctttcttgaatttgtatttttactaccttggtatttggttttaaagtttacataaacaggatctgatttttcttccactcaatttaagggaggttcgtggtgtcttatctatagcctctaattcgtttctcactcaagccctgtacagccagatactgctgttctttggctgagcctcaggtaaaatggttggctctccagtcctttatagaaaatcatggcaggaaggaatgggagagaaaacagattctgcctcccagctccacgtgaggaagagttttattattaatttttattttattttttttgagacggagtctccctctgtcgcccaggctggagtgcagtggcacaatctaggctcactgcaacctctgcctcctgggttcaagcgattcttctgctcagcctccccagtaggtgggactacaggcgcgtgccatcatgcctggctaatttttttttttttttgttatttttagtagagacgtggtttccccatgttggccaggctggtctcaaaactcctgacctcaggtgatccgcctgcctcagcctcccaaagtgctgggattacaggcatgagccactgcgcccggcctattattattaattttaaaaatagagattgcagtcttgctatgttacccagtgtggtctcaaactcctggcctcaagcgatcctcctgcctcggcctcccgaagcactgggattataggtgtcagtcacagcgcctggccagaagagttttcgagggctggcttttcaggtcgttttctgggcctcaatgtctatttctgacaatgtggggaaaagaaagatcagattgttactgtgtctgtgtagaaagaagtagacataggagactccattttgttctgtactaagaaaaattcttctgccttgagatgctgttaatctataaccataccctgttatagatgacggggttctctataaccaaccccgtgctctctgaaacatgtgctgtgtcaactcagggttaaatggattaagggctgtgcaggacgtgctttgttaaacagatgcttgaaggcagcatgctccttaagagtcatcaccactccctaatctcaagtacccagtgacacaaacactgcggaagaccgcagggacctctgcctaggaaagccaggtattgtccaaggtttctccccatgtgatagtctgaaatatggcctcatgggaagggaaagatctgaccgtcccccagcccgacacccgtaaagggtctgtgctgaggaggattagtaaaacaggaaggaacgcctcttcgcagttgagacaagaggaaggcatctgtctcctgcccgtccctgggcaagtcttggtataaaacccgattgtatgttccatctactgagataggggaaaactgccttagggctggaggtggaacatgcgggcaacaatactgctctgtaaggcactgagatgtttatatgtatgcatatctaaagtacagcatttaattctttaccttgtctatgaaccgttgttcacgtgtttatctgctgaccctctctccactattatcctatgaccctgacgcatccccctctccaagaaacacccaagaatgatcagtaaatactaagggaactcagaggctggagggatcctccgtatgctgaacgctggtcccctgggccccctttatttctttctctatactttgtttctgtgtctttttctcttccaaagtctctcgttccacctaacgagaaacacccacaggtgtggaggggcaacccatcccttcagacaattgggaggtgagggccgattgccttacacggtgagacaagcggcctgactcgtgactatttttttggacaaatcaggcagccactgactcccttcattatggcctcagctttatctctgggcaataagtgtgatcccttccttcgctgcgtcctttgcaggggcggtggcgctctgcaaggcccaagggggcgtggtccagatgactttgaatcccagttgtcgcccccagggtcagccaggagactagtcagaagcaaacgcgcctgcggcaatccgcccgatgcctttggtctctctcgggcttccgtccacccgcccctcccccgcgtttccattggctgtagctccggcccggggcgggcgaagagggagcgagtgggcggggccgcgtggcgtcagcgcaagatggcggcctcggcagcggtgttctcgcgcttgcgaagcgggctccggctcggctcgcggggactgtgcacgaggttggcgacgccgccccgccgggccccagatcaggtgagcggaacgagggtggccctctgaatgtggggtcccttccctggagttacggacatatcgccgccccttgggggttccgggacgcctcacctcagggtgctgaatgaaacgccgcttgtgttttggggcccttcccaacctcctgggtggttgctcccctaggctggaggctgggaatccaggtgtgtccttagaccccacctcccacccacgtgggtgccggaggaggagggggttaccgttccccgtttcagtgaccactcaggtgatacttgagcaggaggggcctgggacgctggagtcccagtctggccgtgggagttattttctctgtggcgttggtggtggcgaggtagacgtttgggtttccaattcgacttgcctccatgttgacagagacccagccattctgacctccaagtctatcacttctgtgccttagttccccaagccccagacaagtgattgcccttccccgcctccgctcctatcccttaccctataactctgctacttttagccccaagcagccggacgtcgtaactcccggttctgtctgtaccccttcccccaccacttgtgccctccgttccctctcatcccagtgtttaggccctcccatcccttattctccgtgctttgcttttctgggctgcagaccctccagtcctgttgccttcaggatcctgtgcacctggcctgttagcttttaaaactcctggcatcctggtgcgggacagtctggttttgaccctctgagcagccccacatcctgactgctactccagggacacagatgtccagggctctgtgggtgtctgcctcttggctcctgaacttgattcttcttggactggagggtggggaccatcctgacctctcttctctcttggctgacctcccctttctcaaccgcaggccgcagagatcgggagccgcgggagcactaaggcgcaagggccacagcagcagccgggctcagagggtcccagctatgccaaaaaagttgcgctctggcttgctgggctgcttggagctggtgggactgtgagcgtcgtctatatctttggtgagggacatatccctgtcccccagttttgttccttggcctccctggtccactgtggaacctcccactcttgcccactaccagcttctctcgtcttcattccctggctccttcctcaatagggcagccaaataagacacctaccttgaaaaccagggaagtcttctttcttctcccttccactccttaaggttctagtctttctagttggttcctgtaccaggataaaggaaagaggggaagatggggaaggataggcctggatcagcttcctaaactttgtctttcctcagcagccaaaaatccagccttcccactagttactttaaatcccacagacccggccgggcacggtggctcacgcctgtaatcccagcactttgggaggccgaggcgggcggatcacgaggtcaggagacggagaccatcctggctaacacggtgaaaccccatctctactaaaaatacaaaaaaaaattagcccggtgtggtggcgggcgcctgtagtctcagctactcgggaggctgaggcaggagaatggcgtgaacccgggaggcggagcttgcagtgagccgagatcgtgccactgcactccagcctgggcaacagagcgagactctgtctcaaaaaaaaaaaaaaaaatcccacagacccaaaagacctagccccagccccatttctctcaaagacccaggaatcttggctcccagccccctcctggcttgactccaggaggctgtgcctctctctttcctcagatccaggagtccaggccccttatcccactcctccctcgggacccaggggactgggccctaattcctcatattcatcctggtctcccttgcaggaaacaacccggtggacgaaaatggtgccaaggtgagggggaaagagaccgaggccttgccaggagtcctagtctgtgggtgagaggggtcccctttggtctgttcaggcacattgctggtctggagtgagcctttctttcccagtgacctttgcctgttcctcttggggtcctggagattccttttctgtatgtgatggggttctgcctctgacatcctaaaccttccatttttctctctacctcccagattcctgatgagttcgacaatggtgagtaaacaagcacagattctggagtccctgaccctctcaactctgtcatttgtaaggatgtctctctccccatctggtgtctccggcccctcctccttccactggggaggtgggggagccagcagctggatggctttgtggggagggacattacaaagcccaagcccacttccctggcccctcagccccgagcagatggtcagagacagatgggggattggagccttgggtgggagggcttggggacacagggtggcctatctccagacacatgggttcctgtgccttagaccaagcatctgcggttcccaactccttccccatccccctcgagcccctaccccattaggctcattttcaaaactatgccgccttcctctctccccttctggttaaccagcttttggtggtgaagtagatgacaaattggatagtagagagtagctgtcaatcctgtcacacctggctcttcctaggagaaaaatgaaattggtgggtccagaaagccacctgtttatgctgggggatgtttgcaaacagtcatgttaatacattgattgtttcaaactgggcagttgtagaatcatgctggcttcaacaaatcagtatgctgatttaaattgggcaggtacatctgcagttttaaagtgtatatgtttactagcctaactggtttcaatattgtggtttatttttatttttatttttttttgagacatagtcttgctctgttgcctaggctggagtgcagtgatgcaattttggctcactgcaacctccacctcctgggttcaagcatttctcgtgcctcagcctcccgagtagctgggagtacaggcgcacaccaccacactcagctaatttttatagttttagtagagacagggtttcaccatgttggtcaggctggtctcgaactcctgacttcaggtggtcactcgcctcagcctcccaaagtgctgggattacaggcttgagccaccactcctggcccaatatattgtgttttttttaagaggcaggcccatgtattgcactaaaaatactgtattaaagtaggtagccttgtaagtttactgttttatactggattcattagccgggagtggtggcctgtgcctgtggtcccagctactcaggaggctgaggtgggaggatcacttgagcctggaagttacaggctgcagtgagctgtgatcccgccactgcactctagcctggatgacagagtgagtctccatctctaaaaaaaaataagttaaaatgagaaagtaaactggagtcaatatattcacttaaaccagggtttttcacccttggccctattgacgctttggaccagataattatagaggactgccctgtgcattgaaggatttttgcagcatcctgggcatctgcctactagatgccagtattgcgataaccggttatatctcccggcattgccagatttcccaggggtaggcagatagacaaaattgttcctagttctgaaccactgttttatggtatatggatgtgtttatatatttattgtggtttagattcagcacactggattaaagtgggcagatctggaagcctagtgattcaaagtgggcaaaatacagtggcataaattaggtgtggtggctcacgcctgtaatcccaacactttgggaggccaaggcgggaggatcacttgagcccaggagttcaagaccagcccggtcaacagagcaagaccctgtctctattaaaaaagtatgtataccctggtgtaatgtcagcagatttacatgtatgtgggttttgttttgttttttttttttctgagacggagtcttactctgttgccacgctggagtgcagtggtgcaatctcggctcgctgcaacctccacctcccgggttcaagtgattctcttgcctcagcctcccaggtagctgggactacaggcacatgccaccacgcccggctaatttttttttttttttactgttttagtagagacagagtttcaccatgttggccaggatggtcttgatctgacctcgtgatccgtctgcctcggcctcccaaagtgctgggattacaggcgtgagccaccgtgcccggccttgtatgtgggttttaagtgggccaatgtaataagcattctgtttcatacctggggtagtatgtggatataagtatcagcttaaaatagggcaagtaaataaatctgtgttcctatctggcggtatgtcattgccttctatctttggacctagaaatgagttggttcaaaccaggcagatatgcagacctgtttgtatctggtagataagaaacccctggtttgtctgggaggttgaacagcggcttattgtggaatctctttgtgcctggtgttctcctagatccaattctggtacagcagttgcgccggacatacaaatatttcaaagattatagacaggtgagcagaagccctgggctcagtccccatgtctccagccctggcctccttgtctgagcgcccccatcctgtccctctcccacagatgatcatcgagcccaccagcccttgccttctcccagaccctctgcaggaaccgtactaccagccaccctacacgctcgttttggagctcaccggcgtcctcttgcatcctgagtggtcggtgtgtcccgggaaacccagtgggttggggatagacctgggcagtggggttgtgatgaggtggactttcagccctggctgtgctatgtgatcttggggaggagatgtcacctgtcattgcctcgctttcttcagctgggagaaggcagtcatgctaacacccactctgtagggtagtgtaggtgtgcccaggcacgctataagtgccacaaaggagccagacccgcagtcacagcctatgaacttcttgacctccaagagccacagagacagagggagagaactctgttctgggaatcccccaggctggatctttgtcctcttggggactctgaggacctctgggtcttggtgtttcactgtcctcactgtcttcccagctggccactggctggaggtttaagaagcgcccaggcatcgagaccttgttccagcagcttgcccctttatatgaaattgtcatctttacgtcagagactggcatggtgaggctctggggcaggggagggaatattggtgtggtgggaggcgtagagatctggaggaccagggctcagcctgaccttttctcgctcccttcccacccccagactgcgtttccactcattgatagtgtggacccccatggcttcatctcctaccgcctattccgggacgccacaagatacatggatggacaccatgtaaaggtgccgtgggttcatgggtgggcctctgggatttggcggagttggcaccacctgagggaaggagggcccagctctgaccctagcctcacctggcttatggttctgcccagattcgattcctgctggcaggcacatgcctgcctctagccttggccagacatctgcacccttctttgttccctggaatctgggtgtgggagtggggggaaatggggtctctctaaagaagacagttgggggttagtggtaaggtcgtacgatttagaagctggttttatcttgctgtgtctgtaacttagtgtttctgggaaggtttgcttatagttgtacatatgagactggttggggtttgtttgacccgggctctgttactgtggccagtgctgtattcaggagtccggatctgcgaatgggcctctgtgggtctggctccaagtgtctgtgtgtctgttggtttctgtctgtgtcgtgtcggggtgggggttctgtgttgctcttggaaattccaaaatacgtgggctgtgatcgagggtcttgaagggtctgtgtctgggtgcctgtctgtgtggttccctgggtgtggctgcagatctgtctgcacctgtttacttgagtgagaggttcttaaacctgcaacataccacagtcacctgggcaggggttaaacacgagagtggccacctccctctccagggaacttcctaatcacctctctgtgtgctaggccctgggtctagaagtctatgtgattagctccccaatatcctgggggttgttttgttttttgtttctgagacagggttttgctctgtcacccaggctggagtgcagtggtgtgatgaacatggctcactgcagtctcaaccttctgggctcaagcgatcttcccacctcagcctcctgagtagctgggcctataggcacacaccaccatgcctggctaatttttatttttatttttatttatttattttttttgtgagacggagtctcgctctgttgcctaggctggagtgcagtggcgcgatcttggttcactgcaacctccccctcccaggttcaagcgattctctttcctcagcctcccgagtagctgggactacaagcacacaccaccacacccagctaattttttgtatttttagtagagacagagtttcgccatgttgcccaggctggttttgaactcctgagctcaggcaatctgcccaccttggcctcccaaaattctgggagtacggtcgtgagccaccgcacccggccattttttgtatttagtagatacggggtttcaccattttagccaggctggtcttgaactcctgacctcaggtgatccgcccgcctcggcctcccaaagtgctgggattacaggcgtgagccaccatgcctggccctctgtgggggtcgatgccatcatccaaagccggtctttgagaggccctgccattgtgatcccagtatgtgtgatgctgtgtatgtatgtatgttttgtgtgttttgggtcttcttgatggggggagagttgggcacagatgttgacctgatctgtcactcacttccaggatatttcatgtctgaatcgggacccagctcgagtagtagttgtggactgcaagaaggaagccttccgcctgcagccctataacggcgttgccctgcggccctgggacggcaactctgatgaccgggtcttgttggatctgtctgccttcctcaagagtaaggctgacccctgatcccttggcctctgaccccagagcccctgactctgaagaggaaggataaatgcatgattcatggctgggcgactgaggtgcaagaggtgcctgagcaccttggagtctttaggagcttcttaggatgttcatggaatgtttgggggatacttggggatgttcaggggagccctttcagagcgttcagaagcattccaggtagcactgactgcccccgtgccccagtgcgggacgttcccctcatgggccctgcctccctctggcctttagaagcctggctgaccaccccctgttgtgcccacagccattgcactgaatggtgtggaggacgtgcgaaccgtgctggagcactatgccctggaggatgacccgctggcggctttcaaacagcggcaaagccggctagagcaggttggtgctcagatgcccagagtggaggatcggctctgaggctcctgaaggaggagcctggggcagtccatctccacactcttggtttggctgtgtgaccctgagcagatacctcctctctgcctcagtctctgtaaccagggggatataacacagcctgtcctgtagggctgccagaatgaggggatgcattgattctgcagcctgctctgagaacaggaaacaggagaggatttgagattaggctgggagaggggttgcccttgatggtcttgagtaggtctgggggcaccttgtggaggtggattgtgggttttagatcaggcctggaaagaggctccctgggcacgtggcccaaggctgtggggagagatgtgatagtcttggtgggaccctggtaatttggaagtgggactgagagtatggattgcgtctgggtaagattcccaggggtctaggctgaggttcaccagattctaggttaggttcctagagttgggagcccctgagtgcccagagaagtccctagagatttgggcctggggaccccccagggaaccccccacccctgcatccagagaggggtcatggggctcagagggcccaggggcaggatgatgcagtctggtgaggagggccatggggtttggacctgggatctcaccagcattcaccttggggtaacagggtctgcgataggatctcaggctcaggggaggggtccctgggatctggggaaggagattatgacagtctggggcctgagaacctactgcagttcaggcctgaatacctcgagtgcctagtattggagtctgtcgtcccccaaacattgaagcctaggctcctgcggctcagagctggctcttcctagtgtctggggtggggggactggggtctagggtcccttgtgtctgggctgggggccccagggtttggggaaaggggtctggacttggcagaagtcagaaggaaaggtggtccctgggctgaggcctggggacctgggcatctgggaggaggctctgtccaccttgcgctgaccctctcctccaactgtccccctaccccaggaggagcagcagcgcctggccgagctctccaagtccaacaagcagaacctcttccttggctccctcaccagccgcttgtggcctcgctccaaacagccctgaactctgggcctcctcaaactcagtgcctgggtccagggccccagtgcttccagaccaagacttgggccaccacttgtccaataaagtacatcccagacgccacacctgctgtgtcccgagagtctccagatgggggcatcagggtgaggtccgggactcttgggtcatcgtcccacagtggctgatcggctgccaagcacagtgggggtgctttgttggatcagagcagatttttcaccctggtctcggaatctaaaaaccctcgctgtgtcttcctgtgtgttgcgtgatctgtgaaaaatacatctccctctgaccacagactcctcatctgtggagaagggaagagaggatggcacttggctttaaagacaggtagctgccaggctactgtggagagaatgtgttatgggcctagtgggcctctggtggaccagagattacccctctcaacaggccagctgctggttggctccagccagtgtggccctggggtaaagggggcctggagttgcttgacacgccagttgttcaaaagaagcaagaacttgggaatattttttttttttttttgagacagggtctcactgttgcccaggctggagtgcattgatgtgatcttagcttacaacagccttgacctcccggctcaagtgatctccaagtgaccctcctgcctcagcctcctgagtaccctcctggggactacaggtgcgtgctaccatacccagctaatttaaacaaattttttttttgtagagatggggtcttggtgcccaagctggtctcaaactcctagtcttaagcaatcttcctgctttggcctcccaaagcgctaggattccaggtgtgagctactgtgcccagctaaaatagggatttttatattaaatctccctattttaaaatgttggctcctagcggggcgcagtggctcacgcctgtaatcccagcactttgggaggctgaggtgggtggatcacctgaggtcaggagttcaagaccagcctcaacatggagaaaccccatctctactaaaaatacaaaattagctgggcgtggtggagcatgcctgtgatcccagctactcaggaggctgaggcaggagaattgcttgaacctgggaggcggaggttgtggtgagccgagatcgcaccattgcactccagcctgggcaacagcagcgaaactccatctcaaaaaataaaataaaataaaaataaaatgttggcttctaactaaaacaggcagatatgtagcagtgttctccactggaactttctgtgatgtttggttcatgttctaggtctgtactgtccagtacagtagccagtggccacataaacctttgttttttttttttgagacggagtttcgctcttattgcccaggctggagtgcaatggcacgacgtcggctcaccacatcctccgcctcccgggttcaagcaatgctcccgcctcaacctcccaagtagctgagattacaggcgcacaccaccacgcccggctaatttttgtatttttttagtagagacagggtttcaccatgttggttaggctggtctcgaactcctgacctcgtgatccgcccgcctcggcctcccaaagtgctgggattgcaggcatgagccaccatgcctggccccacataaagtttctgagcacttgaaatgtggctagtgtgactgagaaactgaatttttaattttgtttgagactgggcacagtggctcacgcctgtaatcctgacactttgggaggccgaagcaggaggattgcttgaatccaggagtacgagaccaccctgggcaacatggtgaaatcctgcctctaaaaaaaaaacaaagtaacgagcccagcgaggttatgcatacctgtagtcccagctacgtgagaggctgaggtgggaggaatcccttgagccaaggaggtcgtgcgtggctgtgatgatctgtgatcgtgccgctaaattctagcctgggcaacagagcgagaccctgtctcaaaaaaaaaaaaaaaaaaaaaaaaaccttaagatttttttttggagtcagggtctcgctgtgtcgcccaggctggagcacagtggtgtaactatagctcactgcagtgttgaacttctgggctcaaacaatcttcctgccttggcctccccaaatgctgagattataggagtgagccactctgcccaactacttttaattaaatagccacatgtgtctcctgtattgacagtaccactgtgtattaagagtatgagtcccagattgtgtaagttcaaatccaagctctaccacttctcggctggcttgtgatcctgtgcaagttactttacctctcagtgcctcggtttctacatttataaaataataactgggcaggcacagtggctcatggctgtcatcccaacacttcaggaggccgaggtgggaggatcgcctgaggccaggagttggagagcagcctgggcaacatgggaagagcctgtctcttgcgggggggggagaagaaagttcttgtctcaggctagctttggggaccaaatgaagcactcccatgtaggcactcaaatggaactatgtaaaccttaggcaaggcacctctgcctcagtttcctcatctctaaaatggggtgatggtagtatgttagcagagtggttgtgaggagtgaacgggacagtccgtatgtgggttatatgtatatattcccaggtgcttgctgttaccaggccatatgggttattcacagattgaaatatcttagctgggcacggtggctcacccctataatcccagcactttgggagaccgaggcgggtggatcacctgaggtcaggagttcgagaccagcctggccaacatggtgaaaccctgtctctactaaaaaaatacaaataaattagctgggcatggtggtgggtgcctgtaatcccagctacttgggaggctgaggcaggagaatcgattaaacccaggaggcagaggttgcagtgagctgagatcacaccattgcactccagcctgggcgacagagtaaggctctgtctccaaaaaaaaaaaaaaaaaaaaacaaaaaaaaaaccagtttgactttatctccctcgccctgcctccatccccacattgccccccactatcccagtctctcctactccagccttcatctagtgctaactgattaaatattctaagatgaccttctctggtgtgtgtgatgataattaaaaggcattcagaactgtgtggaccagactgaacctctgcactctagatttttttttttttgaagcctctacaaaggataattaaaatttacaccatgactctttgtcctggggtgcactgtctgtaagccggtggagttatttcccaaaatccttggtccttcccagcttgaggaagtctgcaggactgagggaggggacctgtgcttttttttttgtttttttgagatggagtctctgttgcccaggctggagtgcagtggggcgatctcggctcactgcaccctgcacctcctgggttcaagtgattctcctgcctcaggctcccaagtagctgggattacaggcgtgtgccactgtcaggcctctgagcccaagccaagccatcgcatcccctgtgccttgcacatatacacccagatggcctgaagtaactgaagaatcacaaaagaagtgaaaaggccctgccccgccttaactgatgacattccaccattgtgatttgttcctgccccaccttaactgagtgattaaccctgcaaatttccttctcctggctcagaagcacccccactgagcaccttgcgaccccccactcctgcccgccctttgactgtaattttccattaccttcccaaatactataaaacagccccacccctatctcccttcgctgactcttttcggactcagcccacctgcacccaggtgaaataaacagctttattgctcacacaaagcctgtttggtggtctcttcacacggacgcgcatgaaagccaccacactcagttaatttttgtatttttagtagagacagtttcaccatgttggccaggctggtctcgaactcctgacctgaggcgatctgcccgcctcagacttccaaagtatggggattacaggtgtgagccactgtgcccggcctaatttttgtatttttagtagagatggggtttcaccccgttggtcaggctggtcttgaacttctgacctcatgatccacctgcctcggcctcccaaagtgctgggattacaggcgtgagccaccgcgcctggctttttgttttgttttgagacagtgtctcactcttgctcacactggagtgcagtggcgctgtcaccactcactgcagcctcgacctcctgggccctcgtgatcctcccacctcagcctcccaagtaactgagactacaggcacatgccaacatgccaagctaattttttgcattttttttttttaagagagatgaggtttcaggccgggcacggtggctcacagctgtcatcccagcactttgggaggccaaggtgggcgaatcacgaggccaggagttcaagaccagcctggccaacttggtgaaaccccgcctctactaaaaataccaaagagtggctgggcgtagtggtgggcgcctgtaatcccagtcactcggaggctgaggcaggagaatcgcttgaacccaggaggcggaggttgcagtgagccgagatcgcaacactgcactccagcccaggtgacagagtgagactctgtctcaaaaaaaccaaaaaaccaaagctctgctgtcatgagctgatgttcagtgttctcatggaggagacaaacaatgatcagataacttcctagggtaataaatgcataaagaaaaagtatagcaaggagcagcagtgatctggggactcagaggactggtttagacctgatgggatggtcgggaggcctcttgggaaggcgcatctgagcagagatgggatgaagtgaggagggaagccctgggatagctgagtgtgcctgaggcacactcagggcctcatgcttaccgcaaggcctccgcaattgctgttcgctctgccagaagtgtttttccctagagactacacaacttactcctttaggcctttgcttaaatgtgaccttagcatggcctattttttttttttttttttgagacagtcttgctctgttgtccaggctggagtacagtggtgtgatcttggcttactgcaacctccacctccaagattcaagcgattctcctgcctcagcctccccagtagctgggactacaggcgcccaccactatgcccggctaagttttgtatttttagtagagatggggtttcatcatgttggccaggctggtctcgaactcctgacctcaagtgatctgcccgcctcagcctcccaaagtactgggattacaggtgtgagccactgtgcctggccagcatggccttctatggtgactacagtcaacatataaagaaaagttgtgaatagccagaaagatgctcagaaatcccttaaagtacacgacacgacacacgcacacacaccacaagaaaatccacaagaaatgccatcgtgcctgccacaaaccttcacaaaggctggcaatttttataatctttaaaattttagagccaggctcagtggctcacgcctgtaattccagcactttaggaggctgagacaggagcatcactcgaggccaggagttcaagaccagcctaggtaacatagtgagactctatctctaggaaaaaaaaaaaaacaaacaggccaggcgtggtggtgggcgcccataatcctagctaaatgggaggctgaggcaggagaatcgcttgaacccgggaggcggagattgcagtgagccgagattgagccactgcactgcagcctgggtgacagagcgagactccgtctcaaaaaaacaaaacaaaacaaaaacaaaaaaaccccaaacaaaacaaaacaaaacaaaaacaaacattctgagatatctcagacctggaatctgttccccccaatgatcatccagggcaggaatttgcttccttccatagctggttgcccaaattctgttaaaatatattctgtgatgggaagcctattccctcacctaacccagtattagacctaatttgcctccaggtgactttggtttacaaggtctggctttactccttggggccacataacttgtctgacctcggggggatgtggaaggagggtctcaaatgtcagccttagaagcttacatatttagaaggcactggggagctacagaaaagtctaatgcaagtgaaggaaatggtctgatttgtgcttagataaaccccacagggccaggcatggaggctcatgcctgtaatctcagcactttggaaggccgaggtgggaggatcgcttttgcccaggagttcagcctgggcaacatagggagaccccatctctaccaaaaataataaattagccaggtgtggtggctcatgcttgtaatcctagctacttgggaggctgaggtgggaggatcatttaagcccgggaagtcgaggctgcagtaagctaggataatgccactgcaccgcagcctgggcaacagagaccccatctcaaaaaaataaagacctcataggccagaatggtcaaggctgagggaggcacagacagaggggtcgggcagaataaaagaatcatagggggatgtgggagctcagaggaggtgcttgatgcttctggggagtgttaggtagtgctgcctggaggaggtgaagtctgaatggtgaaaaaggaattaaagaagggagtggagccgggcacgttgggtcacgcctgtaatcccagcactttgggaggccgaggtgggcggatcacgaggtcaggagttgaagaccagcctggccaagatggtgaaaccctgtctctactaaaaatacaaaaattagcgaggcatggtggtgcgcacctgtaatcccagctactcgggaggctgaggcaggagaatcgcttgaaactggaaggcggaggttgcagtgagtggagatggagccgctgcactccagcttgggcaaagaataaaactccatctcaaacaataataataaattaaaaaaaaataagggagtggaaaagacaaatacagggaaaaggagcctgggatgttctgcccaatctgacccatggcgctgccttgctcaaacgccactgttgtcagaattaagagaagaatctttaggctgtttttttctcctcctcctcctccttttctttttttttgtagaaaagtgtgtcttgctgtgttgcccaggctggtctcaaattcctggcctcaagcagtcccctgcctcagcctcggaaagtactgggattataggcgtgagccgctgtgcccagcctggtcttctttcattcattaaaaaattaactgcgcagggattagtggctcatgcttgtaatcccagcaatttgggaagccgaggtgggtggaccacttgaaggtcaggagttcgagaccagcctggccaacatggtgaaaccccgtctctactaaaaatataaaaaattagccgagtgtgttggtgggtgcctgtaatcccagctactctggaggctgaggcagcagaatcgcttgaacccgggaggtggaggttgcagtgagccaagatcgcaccactgcactccagcctgggcaacaagagcaaaacttcttcttctgaaaaaaacaacaacagcaacaacaaaaaacagagcgcctactgtatgcctggctctgctgggctaggcttcgttggttactatatcttacttctctggaaaaagacatataaattgaacctgtattttcccctataattattagcctctaagcactaaagttttttactttgggggggaaaaaaaagaagttaccccagctcaagggttttgccccatgcctggcagggagcaattatgaccagaggggctgggacatctgctcctaattggcttttcctgctgaggtcctggaatactaaagggtttctgaagggcccgggatgtccccccccccagttcttctggggtgggggagcgggtccctgtatgtgaagacggaatttcctgcccatttgctcctcacaccttccggaggccaaacgggcagcccagctgcggcccgaagggggaggggctcggccgcccggcagatggcggcatttacatacagctgggagccccctcttgaggccgagctcctcgccctggcgtctggtgcgtccgcgatgcggggtttgggagggtggctttgtcttgcggagggggaacacacacacgcctgcacacaggggtccacaaagagccctggatcttcatcgtatccacacacagctacacccgtggatctcccaaacccagtctcattcacacaaaccagcgcacacaggggtctacaaagaactccggatcttcatcgtattcacacgcggctgcatccgtggacctctcaaacccagtctcattcacacacaggcgccctcagccattcaccaccttgcacagcctctaccacacccgcacagagcacaaagtcacaggtttatacgcctatacaggatctcccataaacacacacgcacagagaagcagccacacagccacacaatctcaaagcgtcacacaatcacgaagtcgtgtacacttctagtgtcccactcgggtgtgcgtgcagaatcagaattgtttacaacctcataaatgtgtcaatcacacacaactccaggcgtatgctgagccgcacagtcccacgtggactcacaatgacaaagtcatgtgcaccctccggtagctctggttcataccacacacacaaaatcttaaaatcatgtacaacctcacacacaggcttagccccctaaccccaccccaccctagccacacaaaaagtcgcgggatcacccacgcatgacctcgctcgtgcccacgaccacagacggaatctcgctgttgctcctgcacgctccccctcccctgtgaccgccccccccgccccgcccttggtcccttggggccgggtagctgcctgaaggggcggggccattctctcagatataaggcttggaagccagcagctgcgactcccgagacccccccaccagaaggccatggtctccccacggatgtccgggctcctctcccagactgtgatcctagcgctcattttcctcccccaggtcagagccaggtgggaggtggcgtggaaagggatgaatgcggaggggaggggtgagtgcgacctgaaggtcctggggaaggagcgtggggcggacgggaagcctgggtcctcccggccgcctcaccctgcgcccgtctccgtcccagacacggcccgctggcgtcttcgagctgcagatccactctttcgggccgggtccaggccctggggccccgcggtccccctgcagcgcccggctcccctgccgcctcttcttcagagtctgcctgaagcctgggctctcagaggaggccgccgagtccccgtgcgccctgggcgcggcgctgagtgcgcgcggaccggtctacaccgagcagcccggagcgcccgcgcctgatctcccactgcccgacggcctcttgcaggtgcccttccgggacgcctggcctgtaagtgctgcccccgggggactcccggtgctggaggcctaaccctgccagcgaaacctccacctcctctcccctccagcttccaagaccctaatcctgcctcccagggggtggacgaaattcccagaccagtaactctaccgtctggaaccccacattcacagacctctaaactctacacactggggattctaaatgttctgattccccaaccctggatgctgggaccccaaattcccagaatttcaaacccaagctctgaaatcctaaactcaaggaaccctacctctgctccttggggatccctaaaaactgtggtcctcatctttatccccaaacctctcacaccttgtcttggggaccactaatatcttctctctctttttttttttttttctgtcctcagttctttcagttgggtcctgtattaattactctttcacctccaaaatcctgtctcccacccccacaacccaaaggcacaaagatgaacagacctgtattgcaatgcttgacccttgtccttttggacaagtgactgcctggtttccagcctcagtttcctaagcttaaaaatgggatcatcctggtacctcacaagggtcccttttgagcgattcaaccacatctcttgaataaagtgcttaccacgtagtaagtgctcaataaagcaagccacgtccagtcgctcacactgtaattccagcactttgggaggtctaggcaggaggatctcctgagcccggcagtttgagaccagtctcagtaacatagtgagacctcgtttctaaaaaaaaaaaaaaaacatagcagggcatggtgacatgcgcgtgtagtcccagctactggggaggctgaggtgggaggattgcttgagcctcggaggttgttgcagtgagccaagattgcgccagtgcactccagcctggttgacaaagtgagattctccccccccccccaaaaaaaagccacagatgtcattccctccctgggctggtctggtccctctgggaattgtcccttgcttgctcagtccccagcaatggccatcaccctccattcctgaactctggccttcattgagtacttaccctaaccactgtctttcatctttcatctcccccttccttcacccaaccagggcaccttctctttcatcatcgaaacctggagagaggagttaggagaccagattggaggtgagtgtcttcagtcttgggactggtggggagctggggcccacgtgagacacggggttggtggtgttatctataggtcttatgatgtcatcacagctcctgggatgtggtgctgagtgttgacagctccagggctcttggcatctcaggcacagaaatgtccctggtactggatgtagcagtggttctggtaccagacgaagtaggggaagctctcttactatcaaggctccagagcagagtgtagcatttcacagccctaccttatcatctgatgttgagagctcagggtgcgatatgaattacttctggttcttttatgtgaagttttttttttttctttccaagacagagtcttgctctgtcgtccaggctggagtgcaatggcatgatctcagctcactgcaacctctgccttctgggttcaagcaattcttctgcctcagcctcccaagtagctgggattacaggcacccaccaccacacctggctacttttttttgtatttttagtagagacaggatttcaccatgttgtccaggctggtcttgaactcctgacctcgtgattcacccaccttggcctcccagagtgttgagattacaggcatgagccaccacgctcggcccctatgtgaagctctgtcaccttgtccatgtggacatcccagggagccccgtgggatgttggagcttcaccaaggcgaatattgagcagaggttcctgggagggatacagggcattcctatcctcaacttgggagactctgttgctatgtaaggcccacagcgggggttttgtcaccattttttttcttgtttttattttttatggacatgggatcttgctatgttgcccaggctggtctcaaactcctaggctcaagcaatccacaggctttggcttcccaaaacgttgggattataggagtgagccacttcttcaccgttctgatgtagaaagctgtgtcacaatcttggggggtgacacctttgccttcaagaaagtgtcactctcccagtatcccaaggtctcaggtaatgtggtaacttatggtctagtaactggggtctctgtgactattttgatataggaagatccagaggcacaatttaggggtgttatgacctcacttcagacatgttattgttctttggccatatggaggtaccaaatgtcacagggtgttagaggtctcatcattacttcaatttacaaagatctgggtcaaggcccggcgcggtggctcacgcctgtaatcccagcactttgggaggccgaggcgggcggatcaggaggtcaggagattgagaccatcctggctaacatggtgaaaccctgtctctactaaaaatacaaaaaaaattagccgggcgtggtggcaggcgcctgtagtcccagctactcgggaggctgaggcaggagaatggcgtgaacccgggaggcggagctggcagtgagccgagatcacaccactacgctccagcctgggcgacagagtgagactccgtcgcaaaaaacaaacaaaaaaaaaacaaatatctgggtcaaaatacaggagtattacggtttctatgagataactgtttattttttatttttatttttttgagagggagtcttgctctgtcacccaggctggagtgcgatggccgatctcggctcactgcaacctccacttctgggtgcaagtgattctcctgcctcagcctcccgagtagatgggattacaggtgcgtgccaccacgcctggctaatttttttaaagaattttttatttttagtagagacggtttcaccatgttgatcaggctggtcttgacctcaggtggtccacccgtctcggcctcccaaagtgctgggatttcaggcttgagccaccatgcttggctgagagaaatgttacctagagtactagaaaggaccacgacattgcaggtcccagggtgcattggggagttcgcagccttgctaaagtagagggtgactgccattctactcgcgaggtccaaggaccccagggctccatgagggtgttttggcctcgctgggaggggcggggagaatgcggccggggcgctccgtatgcatccatgttcggccgggcccaccccagcacccctcctttgcctgtcctcgcagggcccgcctggagcctgctggcgcgcgtggctggcaggcggcgcttggcagccggaggcccgtgggcccgggacattcagcgcgcaggcgcctgggagctgcgcttctcgtaccgcgcgcgctgcgagccgcctgccgtcgggaccgcgtgcacgcgcctctgccgtccgcgcagcgccccctcgcggtgcggtccgggactgcgcccctgcgcaccgctcgaggacgaatgtgaggcgccgcgtgagtcctgcgttcgaccccaccccgtcccagccggggaccccggcccctcctgagcgtcactcgcggcccccagtcccctctcacaacccactcaccctcttcagggtactctagagtcccccaccatgtaccccaggcacccctcttcagggagctggggaacgcgctgactgctgcggatgtatcccaaaccccgcccaccatccagctgccaccttcggagaaactgaggaccctggacctctctccagccctgccttgctactcgagcccccttccctctcccagccctcttgttgccccaaatcggaagcccacgtccattttctatgctggcaccctccagttccttccctaacccacattcacaccctgtcctgatgctaggactccaaagctcttctaattctgcggccctcccgactcccactcggaagctttggaatctcctcccagtccactctggccaaggggccctccatcctccctccctagggttgcaggccagaacccatggcttcttaaagcttggaattcttcagacttctccccaaatttcagagccccaccaaggcccctaggactcccaggctaatccagatcttctcagagccaccctaattcaatacactcccatcttccctgaaaggccaggggtccccccaccaatcccaaatcccctcactgtctcctatcctcacgatctcacctgggtgcccctgtcccatcctctttccaagagcacagactccagcccgatggcctgggttcacatcatcactcctccacttcctaggtgggctggtcacctcgtctctgtgggcctcagtttccctatctgtaaactgggggggcggtcacagtaccatctagtcccgatgattatctgtcacaaagatgaagcaaggtggctcagggaacgtgctcagaaacctccctgctttccatcttgtccctggccctccccgacgttggtgttccctttctctctgcctctctgtcccccatagtggtgtgccgagcaggctgcagccctgagcatggcttctgtgaacagcccggtgaatgccgatgcctagagggctggactggacccctctgcacggtccctgtctccaccagcagctgcctcagccccaggggcccgtcctctgctaccaccggatgccttgtccctgggcctgggccctgtgacgggaacccgtgtgccaatggaggcagctgtagtgtcagtgtcacccttcccaccttgtcctgcttagtactttaccctgggagccacagccctctccctggggctccatgagacaccagcctggggaggagatctgggaataactatcagggaggtcttcctggaggcatccagccggcatctggggccttgaagtaggattaggtgatggggatgggactggggagagcaggctcagtgggtggccccgaaagatgcaggagtggaaatgatgaggagccgtgtggggccacagctgcccctactgcgggactgagaacgattcagggcccaaggtagtgggtggtggggccaaataggttggagatttgggatctgcgggcacagggggtggagacatcagagaaggcttcctggaggtggcccggggctggggcttctgggacgtgattagagagggtggccaggtgagtggcctgcagggagcaagggtgcagaggtggcagtgagtgagcctggcatggagtgctgggatagagtagggtccagtgtgggccacctggatactgccacactcagggttcaaatacttagggagaggccctgggaaggagagatccagagaagccttcctggaggaggtgggctgagatctaggacctcccagtaggactcgtcagtgtagacagaagcgagcagggcagaccaggcaggcagcatttggtaggcaaagatgtaggggtgggaatggggtcactctgggtccccagagcctcctccctctggggtcacatgggcagacagaagaatgtggagtggatcgaggggatgtcgggaggacctcccagggtggcccctgcatagtgggacttgagactggacaaggagcagcccccagtggttaggactgaggagggggatgggatttttctccaaggaaacacccttctcaagtactcttgtccctgcccaggagacacccaggtcctttgaatgcacctgcccgcgtgggttctacgggctgcggtgtgaggtgagcggggtgacatgtgcagatggaccctgcttcaacggcggcttgtgtgtcgggggtgcagaccctgactctgcctacatctgccactgcccacccggtttccaaggctccaactgtgagaagagggtggaccggtgcagcctgcagccatgccgcaatggtgaggcctggaggcctgaacggcgagggatggggtgggggtcctggatggctcagacagtccagggttggaatcctggctttgactcttctaaccctagggcctggggacctgaccttccacctgcaagcctgtaaaatgggcaaggagacattccctatctcataactattaatatttactgagaatttactgtgtgccaggccctattctaggcactgaggatacagcagggaatgaaacagacaaagtccctggccctgcctgatagagctgaggtgcctggtgtgctgaggataagcagggaagccagtgtggttatactgagatgaggtcagggaggtgactgaggcacatcttgtgggaccccctgggtcacaagaaggggaactttcacttttcccctgagtgagatggagccacaggaaggttctgaggagagaagagacctgatatcggtgctaaaagattaaatgcggcccggcacggcgactcacgcctgtaattccagcactttgggaggccgaggcgggcagatcacctgagctcaggagttggagaccagcccgggccacatggtgaaaccccgtctctactaaaaatacaaaaaattagccgggcgtgatggcaggtgcttgtaatcccagctactcgggaggctaaggcggaagaatcacttgaacccgggaggcggaggttgcagtgagccgagatcatgccactgcgctcccgcctgggcgacagagtgacactctgtctcaaaaaaaaaaaaaaaaaaaaaaaaaaaaaagattaagtaagatcatgaatgtaggctgaagcagagaattgcttgaactcgggaggcggaggttgcagtgagccgagatcgcgccactgcactccagcctggacgacagagcgagactccgtttcgaaaaaaaaaaaaaaaaagatcatgaatgtaaagggctggctgtgtatcttcttgcgagtgaatacaataattctctcccaaacactgagtgttcattctggggtgtgtggtactagggactcagcaccgaccaggacatctctgggccgcaccctcctgggggaaccagcccagaggggaagacagacaccctcagacagagcccagggtgggtggtcagggctgtgatgtaggagcacagggcagtgatcagggctgggatggaggaaggagcatcggagtagaaacctgaggggtgggctagggaagagaaaaggtgggaaaaaatgtgagaaaaggaggaagggaagagaggaggggtattctaggcagaggaaggccagagggttcaaacacgtagttctgggagctgtctactattgaagtatgatcgaagccgaaggaaaaagagacaagggcaccgagagccaaagaggtggagctgaattaattattccaaaacttcattaggaagaaaagcgagctggctttcctggcacactccaagacgctggcccttaagttagagagaaaaaggggaccccgtgcagcgatgacagagctgggaaacagcgcgggcaggtgggtccccggctcccggactgcgccctctgatgctcccttccccacaggcggactctgcctggacctgggccacgccctgcgctgccgctgccgcgccggcttcgcgggtcctcgctgcgagcacgacctggacgactgcgcgggccgcgcctgcgctaacggcggcacgtgtgtggagggcggcggcgcgcaccgctgctcctgcgcgctgggcttcggcggccgcgactgccgcgagcgcgcggacccgtgcgccgcgcgcccctgtgctcacggcggccgctgctacgcccacttctccggcctcgtctgcgcttgcgctcccggctacatgggagcgcggtgtgagttcccagtgcaccccgacggcgcaagcgccttgcccgcggccccgccgggcctcaggcccggggaccctcagcgctaccttttgcctccggctctgggactgctcgtggccgcgggcgtggccggcgctgcgctcttgctggtccacgtgcgccgccgtggccactcccaggatgctgggtctcgcttgctggctgggaccccggagccgtcagtccacgcactcccggatgcactcaacaacctaaggacgcaggagggttccggggatggtccgaggtgaggggctgcgccacagacgaacgccttgcgctgctggctgcttttacccatctccgtggtgcagttggcccgattccttgatgcatttccctggtcggtctctcttaccccggtagctggttttgggttcccctttgtgatgggtaggggaaaacaagatctgagaatttaaagagtctgagtttttcttctttctctcctcccacagctcgtccgtagattggaatcgccctgaagatgtagaccctcaagggatttatgtcatatctgctccttccatctacgctcgggaggtagcgacgccccttttccccccgctacacactgggcgcgctgggcagaggcagcacctgctttttccctacccttcctcgattctgtccgtgaaatgaattgggtagagtctctggaaggttttaagcccattttcagttctaacttactttcatcctattttgcatccctcttatcgttttgagctacctgccatcttctctttgaaaaacctatgggcttgaggaggtcacgatgccgactccgccagagcttttccactgattgtactcagcggggaggcaggggaggcagaggggcagcctctctaatgcttcctactcattttgtttctaggcctgacgcgtctcctccatccgcacctggagtcagagcgtggatttttgtatttgctcggtggtgcccagtctctgccccagaggctttggagttcaatcttgaaggggtgtctgggggaactttactgttgcaagttgtaaataatggttatttatatcctattttttctcaccccatctctctagaaacacctataaaggctattattgtgatcagttttgactaacgaggctgaatgctttgtatttgatgttggggctgaggggaagagattttgtctcctgaggagaatagtagacaggactctttatgttgtaggggtcggaaacgactcaaactgctttaaatataaaagaatttatggctgggtgcagtggctcacggctgtaatcccactgaaccactgagtgagatcagtgctgaagcaggaggattgcttgaggctgggagttggagagcagctgggcaacacagcgagacccctatacgaaaaattaaaacaaaattagccaggcctggtggcgcacctgtagttctacatacttgtgaggctgaggccgggaggatcgcctcagctcaggagtttgaggctgcagtgagctatgatcacaccactgcactaaagcctgggcaatacagcaagatcctgtctctttaaaaaaaaatgtattagtggccgggcgtggtggctcacccctgtaatcccagcactttgggaggctgaggtgggtggatcacctgaggtcgggagttggagactagcctggccagcatggcagaacctcatctctactaaaaaatacaaaaattagctgggtgcagcggcaggcacctgtaatctcagctactcaggaggctgagaactgcttgaactcgggaagtggaggttgcagtgagccgagattgtgccattgcattctagccttggagacagaacaagactctgtctcaaaaaaaacaaaaacaaaaaacgcattagctcataaaatggaaaaatcctaggggtagatatggtttccagcagcaatggactggggctcttggtctttctccagttgcctcttcttaccccttgattgatttcactgtggggaatctctcattggccctggctcgttggtaggccctcctaaaccagtctccaggcagtatggcttcctctgatttggccaggcttgcttattgcctgttgtgtggtagggagtgacgtcagcctgcccagatcacatggaatatataggtgatggggtgtccctgctcccctcagatcagtttgttcccagaaatgagtactgtgtcaggcaggcaaactgacagaccatcttacaagaaataaggaaactccttagtctgaaagcaggtaacctcagacagtaattcaaatttacaccaaaaaccaaagagcaggctgggtgcggtggctcatgcctgtaatcccagcactttgggaagctgaggcgggtggatcacctgaagtcaggagtttgagaccagtctggccacatggtgaaaccctgtctctactaaaaatacaaaaattagccaggcatggtggcgggtacctgtaatcccagctacttgggaggctgaggcaggagaatcaattgaacctgggaggcggaggttgcagtgagccgagatcactccattgcactccagcctgggtgacagagtgagactctgtctcaaaaaaaaaaaaaaaaaaagcacccgtgacagtaattatgtaattataaggattacagtgggctgggagcggtggctcacgcctataatcccagcactttgggaggcctaggcgggcgtatcacctgaggtcaggagttcgagaccagcctggccaacatggtgaaaccctgtctctacttaaaatacaaaacattagccgggcatggtggtacgcatctgtaatctcagctactcgggaggctgaggcaggagaatcgcttgaacctgggagatggaggttgcagtgagccgagatcgcaccattgtattccagcctgggggacaagagtgagacttcatctcaaaaaaaaaaaagattatggtagccctccgtaatccttgaagcatacgttccaagactcacagtggatgcctgaagctgctgatagtaccgaatgcaatctgaacacatttctgtttatgtcttctacctacaagctgaatgcctttcccatcttgactgagcatttatcacaccctgtggccttggaaactttggcagtttgaggtatgacagtgaaactagcatgaatttccttctctttcttcacaatttgatggctagaatattcaccttttttttttttttttttttttttttttttttttttgagacagagtttcactcttgttgcccaggttggagtgcagtgatgcaatcttggctcactgcaacctccgcctcctgggttcaagcaattctcctgtctcagcctcccaagtagctgggattacaggcatgcgccaccacacccggctaattttgtatttttagtagagatggggtttctccatgttggtcagcctggtcttgaactcctgacctcaggtgatccgcctgcctcggtctcccaaagtgctgggattacaggcatgagccaccgagcctggcctagaagattcatcttaaggccaggcatggtggctcacacctgtaattccagaattttgggaagttgaggcaggagactcacttgagcccaggagttcgagaccagcatgggcaacatggcaaaaccctatctctacaaaaaaaattgaaaaaatcagccaagtgtggtgtcattcacccgtagtcccagctacttgggaggctgagctgggaggattgcttgagcctaggtggttgaggctgcagtgagctgtggtggtgccactgtactccaccctgggtggcagagtgagactgtgtctcaaaaaaataaaataaaaagggctggtcacaatggctcatgcctgtaatcccagcacttttggaggccaaggtgtgtggatcacctgaggtcaggagtttgagaccagcctgaccaatatggtgaaaccctgtctctactaaaaatacaaaaactagctgggcatggtggcaggcacctgtagtcccagttacttgggaggctgagacaggagaatcgcttgaacccgggaggtggaggttgcagtgagccgagatcatgccactgcactccagcctgggtgacagagcgagactccatctcagaaaaaaaaaaaggaaatagctgaggcttctgaggctttgtaatttataaagaaaagaggtttattttggctcatggctctgtaggctatacaggaagcacagtgctggcatctgcttctgctgaggcctcaggaagcttccaatcatgatacaaggtgaagggggagcaagcacatcacatggcaagggagggagtgagaggggggtgccaggctcttttatttatttatttatttggtacagagcctccctctgttgctcaggctgaagtgcagtggcacaatctcggctcactgcaacctccacctcccagattcaagcaattcccctgtttcagccccccaagtagctgggactacaggtgtgtgccaccataccagctaattttttttggcatttttagtagagacagggtttcaccactttggccaggctggtctcgaactcctgacctcaagcaatctgcctgccttggctttccgaagttctgggattacagaagtgagctaccacgcccagtctcaggctctttttttttttttttttttttttttttgagacagagtcttgctctgtcacccaagctgtagtgcagtggcacgatgatcttggctcactgcaagctccgcctcctggattcatccattctccatctcaggctcttttaaacaaccagctctcgagggaacaagggaactcacagagcgagaactcactcattactgtggggagggcaccaagaccttcttgagggtttcgcttcgaaacacctcccaccaggcccacctccaacattggcggtcatttcaacatgagatttggaggggaaaaatatccacaccaaatcaatacccatataagaagccagaggctgggcacggtggctcatgcctgtaatctcaacactttgggaggctgaggcgggtggatcacttgaggccaggaatttgagaccaacctgaccgacatggtgaaaccaaccccgtctctacaaaaacatacaaaaattagccagacatagtggcgctcacctgtaatcccagttacttgggtggtggaggcacaaaaatcgcttgaccccaggaggcagaggttgaagttagccgagatcgtgccaatacactccagcatgggtgacagagcaagactctgtctcaaaaaaaaaaaaaaaaaatggccaggcgcggtgggtcacagtggcggaccacctgaggtcaggagttcaagacgagcttggccaatgtggtgaaaccccatctctacaaaaatacaaaaattagctgggcatgatggcagtgcctgtaatcccagctactcaggaggctgaggtgggataattgcttgaacctgagaggtgggggttgcggtgagctgagattgtgccattgcactccagcctgggtgacagagcaagactccgtctcaaaaaaaaaaaaaaaaaaaaaagccagagagctagctggctctcttcctgccatgtgaggctgcaagaagttggtggtctgcaacttgcaagaggtccctccctagaacccaaccttctggcaccgtgatcacagacttccaatctccagacctatgagaaataaatgtttaagccagtttatagtattttttttaataacagcctgagccaactaagagagttgggttttgctgcaataacaaatttccctcaaatcttactgacttacacaatcacaggtttcttttttgttcatggcacacatccaggccaccaggcttttcgtttttgttcaagagacatagtcttgctcttgttctgtcacccagtctagagtgcagtggtgtgatcatagctcatggcagcctcagtcttctgggctcaagtgatcctcctgcctcagcctcctgagtagctggaactgtgggtgcataccagcatacctagctaagtttcaagttttttgtagagaggggttcctggtatgttgtccagtctggtcttgaacccctgggctcaagcagtccccctgggctcaagcagtcctcttggtttggtctccagaagtgctgcaattacaggcagggttttaccatgttggccaggctgatcgtgaactcctgacctcaggtgatccaccggcttgctctcccaaagtgttggaattaccggcgtgagccaccgctccccatcaggggcttttttttttttttttttttttaaatcagtctctaacactggaacacttttctgcttcggaagtaaaaccatcaggctgttagacacagacacccctctcttggcttccttcaaattactgaaaacaagtctctccaccccctaccgtaccaaccaaccaaccaaagactggccagcacatgctgtagtctcagaactttgggaggccaaggtgggaggattgcttgagcctaggaggtcgaggctgcagtgagctgtgattgcaccactgtgctccagcctgggtgacagagtgacagcctgtcctcccaaaaaataaaaaaatgttttaaaaagtacatgtctgatgtgcttacaaaaaataaaagaagatccttggttaatggccctgccccttactccaaggccatatttgctgtgctcactgtctgggctctagtcctgctgcctccagctaactcctcctttacctggctaaccctttgtctctttattaatgccataaacatttattgagcacctactacatgccagatcttattctgggagctgggaatacagcagtaaacaagacggacaagaccccatccttgaggagctcacagcttgacattccttctcaaagtggttaagccccaggatgctggagcctgacgggttgagtttgaatcccagctctgccatttaactagctgtgggcaaatgtttagcgcctagtactgtaataaatgtgaactctcagccgggcgcagtggctcacgcatgtaatcccagtagtttgggaggctgaggcgggtgggtcacttgaggctaggagttcgagcctggccaacatagtgaaaccccatctccactgaaaacacaaacactagctgggtgtggtggcgggcacctgtaattccagctacttgggaggatgaggcaggagaatctcttgaatccagaaggctgaggttgcagtgagctgagatcatgccactgcactccagcctgggccagagtgagactgttgccgtggtgctcatcatcagtctccagatgtcagttgtccccttttctagtgagccgtctctgattgcagcaggctgactgaacctattctgggatcccacagctcctgggctccctcatccctgccctgaacgctctgggctgtagccctttggtaatgggtatgtgtcccctactggacagggagcctggtgagggcagggaccagggctttcctgatgcctgctctgtccccaaattcacccagcagagaagtgtgcacgcagcaggcactcagtacacatatgctgaacacctgagtgtcaccgacagctgcggaggcactggggcaatctgtgtgtttctcagcctggcgtcgggggttaagggggcgggaattactcggcgaggtcgggaggtcgcgcggtggaacccgggggccaggtggaactcggtgtaacagagcccccagtggtcgcgccgcgtctcagaacccggtgcgggagacgctctccccgcccaaagagggaaggcgggcgggactccccaaccggcttgccccggtccccctgggccccatgaataaccaggcgcggaccccagccccctcctcggcgcggacttcaacctcagtccgggcttctaccccgacccggacaccgactccactccggaccccgactccggtccggactcggacccccatccggaccctgactccagtcctgactccgtctccagccgggacttcccctctggtcctgactcctgctccagcccagattcccactctggtccccactcccgctctggcccggatcccccgtctggttccgcctcctgctccggcctggatccctactccggtgccgactcccgttcccgtccggaacccaactccggtcccgactccggctcggaccctgactcctccagtccgggtcccagccccagccccagcccagctcctggcagggattcgggccgcgctccccgtcttggactcctacctggccccggccctacctttggatccgcccccggaacctgctccggagctgcctttgttgcccgaggaggaccctgagccggcgccgagcctgaagctcatcccgtcggtctccagcgaggccgggcccgccccggggccccttcccacgcgcaccccgctggccgcgaactcacccgggcccaccctggacttcaccttcagggcagacccgtcggccatcgggctggcggatccccccattcccagtcctgtcccctcgcccatcctggggaccatcccgtcggccatctccttacagaattgtacggaaaccttcccctcctccagcgagaacttcgcgctggacaagagggtcctgattcgagtgacctactggtgaggacctcacacatgcctctcccaacccccggggacagggccggcagtgggggctgggtctccggggacgtggaggtcagggttggggtagggcgaggggagggattcaggaagagccccagagttccagttcccagattggaaacccgctcttgtctctcattctctttggggcaggagagcttcaggttcaaatccctgctttggatctgagcttcattcattcgtttctgagtgccccgcgggccaagtgccaggcctgtgctagagatggggtgctgagtagagcagatcgatctactttgctccccagcaagaccaacccaaagacaccgcacatgataggggctctggcttcccttcccagcctctctcctgccctggaagcctctctggccccttgtctctctctctctctctcacttcctcctcttctgtctctgcccacaggcggtctctcccactctctgtctctctgtctccccacctcactctctctctcttttgtttttgtttgtgtttcggacaggtcttgctttactgcccaggctggagtgcagtggtgcaatcactgctcactgcagcctcgacctccagggctcaagcgatcttcccacctcagcctcctgagtagctgggactacaggtgtgcaccaccatgcctgcctaattttttttttttttttttgagacggagtttcactcttgttgcccaggctggagtgcaatggcgcgacctctgctcactgcaacctctgcctcccgggttcaagcaattctcctgcctcagcctcccgaacagctggaaccacaggcatgtgccaccacgcccggctaattttgtatttttttttagtagagacggggtttcaccatgttggccaggctggtctcgatcttctgacctcgtgatccacccaccttggcctcccaaagtgctgggattataggtgtgagccaccgcgcctggcccctaatttttaaattttgttgtagagatggggtcggggatggggtgcgggggcagtatcactatgttgcccaggctgttcttgaactcctacattcaagcagtcctcctgcctcagcctcccaaagatctgggattacaggtgtgagccaccgtgcccagcctgtgtctttcctttcccagagtgttgtgtgtttctgcttctccctatctcggttccctcacctctggcctctttctttctctccatcttatcttttctgtctctttctctgactccatggattcgtgtattcatgtattcattcgacaactacttcttcaccacccaccatgttccaggtcctattggcatcagggacacagcagtgaacaagaccgagatccccgtccttgtggctcccatgggctggtgtggaggggcaagcaaaaaaacaataatatgacctgtagaaaatgatctcatatgtgaggaggtgatccgtactgtgaacaaaaggcattttggggggttgcagttttagctggggtggtcaggaaggcctcactgagaagggggtatatgagcgaagccctgaaggaaggagagaaggagttgtgtggatgctgtggggagagcatttggctgagggaactgccagtgcaaaggtcctgaggcagggcatacctggggtattgaaagatgagctaggggcagggcctataatcccagcactttgggaggccaaggtgagtggatcacttgaggccaggtgttgaagaccagcctgggcaacacggcaacatggtgaaaccctgtctctataaaaaatttcaaaaattagctgggtgtgatggtgcatgcctgtaatcccggctacttgggaagctgaagtgggagaattgctagaacccaggaggtggaaggttgcagtgagccgagatcgcaccactgctctccagcctgggcgacagagcaagactctgtctcaaaaaaaaaaaaaaaaaaaaaaaaaaagcccagcgcggtggctcacgcctgtaattccagcactttgggaggccgaggtgggtggatcacgaggtcaggaaatcaaaaccatcctggccaacatggtgaaacccggtctctactaaaatataaaaaattacccgggcgtggtggtgggcgcctatagtcccagctactagggaggctgaggcaggagaatggcgtgaacccgggaggcggagcttgcagtgagctgagatcgcgccattgcactccagcctgggcaacagagcgagactccgtctcaaaaaaacaaaaaaacaaaaaaacaaaaaaaaaagagagagagagagaaagaaagatgagctaggggcttctgtggctggcacagggtgaatgaattggggagaagtgggagaagatggagacagaggggtgagaaggcagatcctgtggtggcttgcaggccacgggaaggactggtttttcccctgcgtgagatggcactacttcgggattctgaacaggggaggaacatgatctaactcaggtgttcatagggtgccctgagctggggaagatactgatgcggtgtcttccctggtctctctcttaactttctcctcctgctcttggcctccagtggcctctgaagctatagccttcgggtgagtagttttggctttggaggtagggggagcctgaggcaggaagactgggaggagtccctgtttcccctcccctgcaaccccatgaccccatctcctcccctcagtacattctactgaaaaagagcctggagcagcaatttccgaatcacctactctttgtaagtgtgtgggggtcctgggggagaggggggtggtcagggatctgagatccccaaggggcttggaggagagagcttagcctcccctacgctcaccatttcctcccaggaggaggacagagctgcccaggctacaggggagtttgaggtgtttgtgaacgggagactggtccattccaagaaggtgatcctgagtaaaggtccgggacagggaggtggggtggtgctgaggtcctgggggtgggagacctgtgtgctttcttccctctgtgcccagaggggtgatggctttgtgaacgagtccaggctgcagaaaattgtgagcgttatcgatgaggaaatcaagaaaaggtagccggcaaggggtggagctggaggtgagcgtggagctcccaaggctgcggtgggaggggtggaggccgggtaggaggatggggcagggctctgtctcagtcctgatcctagctcagccggttctcactgttagaatcatgacaagtcacctacattcttttctgagcctcagttgcctcatctgtaagaccctggggtaggactgtgttcagtgagtttgaaaaatagcaaggaggcagggcacaagtctagcactttggatggctaaaatggcagatcacttgagcccaggagttcgagaccagccagagcaacataatgagactctgtctctacaaaaaataataaataaataaataaataaataaattagccaggcacagtggctcacgcctgtaatcccagccctttgaaagcctgaggtgggtggattgcttgagcccaggagttagaggctgcaatgagctctgactgggccactgcactctagcttgggtgacagagcaagaccctgtctctacaagaaaaaaaaaaagtgccgggcgggatggctcacccctgtaatcccagcactttgggaggccgaggcgggcgggtcacgaggtcaggagatcgagaccatcctggctaacacggtgaaaccttgtctgtactaaaaatacaaaaaattagccaggcgtggtggcgggtgcctgtagtcccagctactcagaaggctgaggcaggagaatggcgtgaacctgagaggcggagcttgcagtgagctgagatggcgccactgcactccagcctgggcgacagagcgagactctgtctcaaaaaaaaaaaaaaaaaaaaaaggaaaagaaaaaatagtgaggaaactagaatgggcattgtagtccatggaaacagtataactgcctgaggcatggtagaccctatataaacacttatttttatatggagctgtcattgttattgttatttaaaattcttttctttctctcccatcttaggagtctcagctggatgatgagaagggctgaaatgttgccaagtcaggtccttttctgatggtggctggggctggggtgagctcagggaggggaagaggagaatacatgcagagtcagcacccctgtgtccagtctgactgtgtctgctgtcgccacactcacctctgaggtctgtggaagtcacctgatattctggccccaggggtgggagggaggggagcttggaaggctagtcctgtagctccagtcctctgtctggcctccactcctcttgctcctgagggcagtttgtttcttttgtggattcgtcatttcccatgccctggttccagatacattttgaaaaccttccatcttattggcattttctggggttgtgagggaaacggggatggcagtcagactcaaacccgtgacactccaaactcgattatgctccagggcccactttctaaacctgtaagatctatgttccagcctgcgcaacatagtgagaccccaactctacaaaaaataaaaaattagccaggtgtggtggtgtgtgcctgtggtcccagctatttgggaggctgaggcaggaggatggcttgagcccaggaggctgcagtgagccatgattatgccactgtattgcagcctggacaacagagtgagatcctgtttcaagaaaaaaaaaaaaaaggaaaaaaacccataggttttagaatgccagtgttgtagggagcgtctctgtgacctggggctggaggagaggcattttcacattcattggacatttatgggctccgtactctgcacctggcatggtggggtcagtggtcacatgccaggaggtcaagggcaaaggcagggggggctcagactttaccacttagttgctgtgtgaccaccaccaagggacgccacctctctgagcctccatttcctcctccataaaatagacgtcatagcactatttaacttgtggaatttttgtgataattacatactaaattatgcttgggaaaggattagcagaaggcttatcacagaattagtaagtttcagttagtagtagatttcagttaagagtgcttttgcctactagtaacagcagacttgactgccaatggctcacacagcagacttgactgccaatggctcacacagtagaaaacacaaattctgttttgtttgttttttgagatggagtctggctctgtcacccaggctggagtgcaatagcacaatcttggcttactgtaacctctgcctccctgggtttaagcaattctcctgcctcagcttcccgaatagctgggattacaggcatgcaccaccacacccacctaatttttgtatttttagtagagatggggttttgccatgttggacaggctgatctcgaacgcctgacctcaagtgatccgcccacctcagcctcactgctgggattagaggcgtgagccacctcaggcctgatgttttcaacacctgacaggataatgtgctggccctgtacatacaaatgatatgctggtgtgagtaggaaataagttatctatcatgcctgctaagacagagtgctggagggtaggggaaagtcccaaaacatatatggggtttgtctcagtgaaatctgtatgtgtcaagcagtataaaacatgagaggatatttcctatgtgaaagatactttccaccccctacagttagggatttgttttttttttttgagacaagagtctcgctctgtcacccaggctggagcgtagtggcatgatctcagttcactgcagccttgaactcctgggctcaagcaatgctcccacgtcagcctcccaagtagctggggttacaggcacgtgcgaccatgccaggctaacgatttttttttttttgagacagagtctcactctgcccccaggctggagggcagtggcgcgatctcagatcactgcaacctctgcctcctgagttcaagccattctcctgcctcagcctcctgagtagctgggattacaggcgcgccccaccatgctcggctgatttttgtatttttaatagagaaggagtttcgccatgttggtcaggctggtttcgaactcctgacctcgtgatctgtctgcctcggcttcccaaagtgctgggatttcaggcgtgagccactgcaccaggcaggctaatgatttttgtatttttagtagagacgggggtctcctcatgttgcccaggctggtcttgaactcctgggctcaagcaatacacctgccttggccttcggaagtgctgggttacagacatgagccaccatgcctggccaggggtttgctttaatcacacttttatgaacttggtgacaccaccctggttcagaacgcctaacatacctcataaaatatttttattttttatttttttgagacggagtctcgccctgtcacccaggctggaatgcagtggtgcgatcttggctcactgcaacctctgcctccctggttcaagtgattctcctacctcagcctccagagtagccaggattacaggcacccgccaccacgcccggctaattttttgtatctttagtagagagggggtttcaccatgttggccaggctggtctccaactcctgaccttgtgatccgcccacctcagcctcccaaagtgctgggattacaggtgtgagccactgctcccggcctaaaatattttaaaaatatttttaatgcaaaattgagctggtgggaaggtaagggaactcctggagtccagaaatctcacagaaatataaatccaaaagtggttggtgttggagttggtacttgctgtgaggaaatctgctaattttgatggcaagaacctgcatgactcaaaatgtaaagggaaaagacagaacccaaggcccaagcgggatgagatgccagagtggagaccatgtggatgccgggaaccccaggaggcagtaccctccagtgggtaggctgggaaaaaatgcccctctcacagaggtaggcagttggggtgattagcagtctccaccttgttagtgagcaaatgattgaaagaaagccttctgttaataagcctgcactcacacaaatttgggacctaaattcctgccatctgacaagtctgaaatttcatctaaattaatgtctggttaggaatgttcccaagtatgtgttatgattaaacagaagtcaactaagaagatgctgaaccatttcccaggtagttcccaaagataatattttgaggaacatgagttagcaattaaaaggagccaggcatggtggcttacacctgtaatcctagcacttagggaggcagaggcgggaggatgacttgaggccaggagttcaagactggcctgggcaacatagggaaaccctgtctctacaaaaaatacaaaaattagcccagcatggtggcattcgcttgtagtcccagctactcaggaagctgaggctggaggattgcttgagcccaggaggtcgaggctgcggtgagccatgattgagccatgattgtgccaccgcattccagcctgggcgacagatcgagagaccctgtctcaataaaggaaaaaaaaaagtcctggcgcagtggctcacgcttgtaatcccagcactttgggaggccgagatgggcggatcatgaggtcaggagatcgagaccatcctgactaacatggtgaaaccccgtctctactaaaaaaaagaaatacaaaaaattagctgggcgtggtggtgggcacctgtagtcccagctactccggaggctgaggcaggagaacggcatgaacccgggaggcggagcttgcagtgagctgagattgcgccactgccctccagcctgggggacaaagcgagactcatctcaaaaaaaaaaaggaaaaaaaaattgtcgttaacataaaagtcattaaagtaaaaaacagtattagatattgtcgtatagtagagaatttagttggcctttgtgtccagttgctgggagggactctttaaatccttggcatttcccaagtgacaggggtgcaccgttaacatggtggaccccttgggccatacttgatagtttttttgttttttttttttcggaaatggagtctcactctgtttcccaggttggagtgcggtggcacgatctcggctcattgcaacctccacctcctgagttcaagcgattctctttcctcagcctcccgagtagctgggactacaggtgcacgccgccacgcccagctaattttttttttttttgtattttagtacagatggggtttcactgtgttgctcaggctggtctcgaactcctgacttcaggcaatccgcctgccttggcctcccaaagtgccagaattacaggtgtgagccaccaccggcccatatttgatagtttagactcaaaaggtgactaacggtgcacttccacttcttgtttatggtaattaggtgaatcagaatggcagctgtcagtgacagaagggccaccatgagcttatgagaaagctggactttgagccacgtggtatcagcttgacagtctgggaggggaaggaagctggagattgagtttcagttccatgaccaatgatccagtcaatcacgcctgcataataaaaccccaataggccgggtgcagtggctcatgcctgtaatcccagtactgtgggaggctgaggtgggcggatcatctgaggtcaggcgttggagaccagcctggccaacagggtgaaaccccgcctctactaaaaatacaaaaattagctgggcatggtggcacatgcctgtaatcacagctactcgggaggctgaggcaggagaatcacttgaacctgggaggtggaggttaaagtaagccgagataaggccattgcaccccagcctgggtgacagagcaagactccgtctcagaaaaaaaataaatgaaaaccccccaaaaaaactttgtgcacgcaggcccagatagctttcccagctaggaatactctgcgtatcaccacaaatccatgtgccagaaaactgatgtgtcctgcctccacagggagaggacgtggaaactgtgcactgggaccatcccagacctcgccatgtgtgtgtttctttcttggctaatcttgatttttatctttttttttcttttttttttgctataataaaactataaaatcatagcactttccccagttctgtgagtcactctagtgaattattgaccctgaaggaggagtgggaaccccctgaatttgtagcctgttggtcaggagtaaggaggtctgggaaccccagagcttgtggctggtgtctggagtgaggacagccttgtggaagactgagtccttaaacctgtgaagacgaatattcactcctagtgtcagaattgcatcgtagacatgaagtagtaactacagaataataaacattttaattgggcaggaggatggtacaattctaaactgtatgtacctattaacagcttcaaaatacgttaagcagcagggcgggcgcggtggctcacgcctgtaatcccagcactttgggaagctgaggcgggctgatcacgaggtcaggaaatcgagaccatcctggctaacacggtgaaactccatctctactataaaaaaaaatacaaaaaattagctgggcgtggtggggggcgcctgtagtcccagctacctgggaggctgaagcaggagaatggcgtgaacctgggaggcggagcttgcacgtgagtcgagatcgcgccactgcactccagcctgggtgacactgcaagactccgtctcaaaaaacaaacaaacaaacaaacaaaaattagccgggcctggtggtgcgcgcccgtaatcccagctactcgggaggctgagataggagaatcgcttgaacccaggagggggaggttgcagtgagccgagatcgcaccagtgcactccagcttgggcaacagagtgagactccgtctcaaaaacaaaacaaaacaaaaacaaaatacattaagcaaaagttgagaaaactatagatcatattataatgtgaaattgtcaaatacacctaaattagagacaggtgaaactgacaaaaaataattcaggatgtagaagagtgtgtagaacataaaccacaagcctgatctaatgaacaaatgtatataattgtatctaacaattggagaatacctttctgcacaaatgaaatatttacaaaatgtaacaatgtgttgtgccataaagcctccatacattttaaataatttgcgtcattcaaaccacattctctgaccactatgtacttaagtcagaaatcagtaacaaaagaaacataaaaatctgaacatcttcaggaattaagaaacacacttctttttttttttttctggcaaaataagccagaaagtgctacatcacccaggctggagtgcaatggtgcgatctcggttcactgcaacttccacctaccgggttcaagtgattctcctgcctcagcctcccgagtagcagggattacaggtgcgtgccaccacacctagctattttttgtatttttagtggaggcggggtttcaccatgttggccaggatggtctcgtactcctgacctcaggtgatccgcctgccttggcctcccaaagtgctgggattacaggcgtgagccactggacccggccttttttttttttttttgagacagtcttgctctgtcacccaggctggagtgcagtggtgggatcttggctcactgcaacctccacctcccaggttcaagcaatccttcctgcctcagcctcctgagtagcagggattacaggagtgccccaccacatccagctaatttttgtatttttagtagagacggggcttcgccatgttggccaggctggtcttggattcctgacctcaagtgattcacccgccttggcctcccaaagtgctgggattacaggcgtgagccacagcacctggcctgaaaatgctatattctaagtcagtagagaaatactaatactcagacaagtaccctacaaactctattgattttatctcacaggaaaaagaaaattatcaatgaactactctcccaaaaagcattagccctgaatggttttcagaataaaaatctgtgaaactttaaaaaccagataattccaatgccagctttttccagagcagggaaaaaataaaatacttctgtactcttcatatgaaatgatatatatgaaatacagttgatctaaatactgaaaaggttgataaactagaaactaatttcacttatgaattctaatacaaaatcttaaataaaattttattttattccataaaataaaatggaattcaatatcatactaaggaataatgtattatgtctaagtgaggggcatttcaaatgcaaggaccattactacaaaacctatgaacatgatttaacatatgaatatactgccgggcgaggtggctcatgcctgtaatcccagcactttgggaggccaaggcgggcggatcacctgaggtcaggagttcgagaccatcctagccaacatggtgaaaccccgcctctactaaaaatacaaaattagccaggtgtggtggtgcatgcctgtaatcccagctactcaggaggctgaggcaggagaattgctggaacctgggaggtggaggttgcggtgagtggaggttgtgccattgtactccagcctgggcaacgagagtgaaactccgtctcaaacaaaaaacaaaaaacatatgaatacatcatgggagaaaagagatccacaaacgcggatctgacctttaacaacattctctaccagttgggcgcactggctcacgcctgtaatcccagcactttgggaggctgaggcgggcagattgcctgaggtcaggagttccagaccagcctggccaacatggtgaagccctgtctctactaaaaatacagaaattagctgagtgtggtggtgggcgcctgtaatcccagctattcaggaggctgaggcaggagaatcgcttgaacctggggggcagaggttgcagtgagccgagatggtgccactgcactccagcctgggcgacagcgagactctgtctcaaaaaaaaaaaaaaaaaaaaaaaaaagaacgaggtaaaactattgttctttgtagatgatatgattgtataccaaagaaaagctactgcaaacaataagagaatagagtaagtttaatagagcaccaaaaaaaaaaaaaaaaagatagcattcaaatttacacaccataaaacctcatttacaatagccataaacaacaaacagaaaaccaaacaaaccttggaatatttttaacaaaaatatgcaagacctatatgaaggaaactttaaaatacatctggggacaaatgaaaagacttaccacattactggataggatgacatcgtgaggatgtcaattctcactcaacagtatatatattgaatgcaacctatataaaaatactaacagcttttgtaaaaattgaaactagtcaagatgatcctaaagttccacaatagaaaaaaaaaatcaaagaacagcctgaaaaactttggaaaagaagagcaatgagggtggactagcactactaggacctaaaacattccaaatgaataaaaattgtaatgttaacatttaaaacttaaaactattcatgagtgtggggggaaggtagggtgcaacctgaggcaaaaaaaaaaaaaaaaaaaaaaaaccaaacaaaaaaccagattccttcatgatcctgcagtggcaaagacctttcttttttttttttttttttttttttttgagatggagtctcgctctgtcaccaggctggagtgcaatggcatgatctcggctcactgcaacctctgcctcccgagtgcaagtgattctcctgcctcagcctcccaagtagctgggattgcaggtgcgcgccaccatgctcagctaatttttgtatttttaggagagatgagtttcaccatgttggccaggatggtctcgatctcttgaccttgcgatccgcccacctcgggctcccaaagtgctggcattacaggagtgagccacacccggccccatgactcaaagtctagaaaccgcaaaagaaataaactgaatatacacagctacattaaaaatttttttctctttttttttttttgagacggagtctggctgtgtcgcccaggctggagtgcagtggctcaatctaggcttactgcaagctccgcctcccgggttcacgccattctcctgcctcagcctcctgcatagctgggtctacaggcgcccgccaccacgcccggctaatttttgtattttcagtagagacggagtttcgccgtgttaggcaggatggtctcgatctcctgaccttgtgatccgcccgcctcggcctcccaaagtgctgggattacaggagtgagccaccacgcccacccaacatttttctgcatggcaaaaggatcacagcagtctgaactgctgtgaactatattccatgtcatcacaaagggctaacttctttagtgactgacacataacttacaagccaataaaaaataagaatatggacagatagttcgctgagaaatgaaaacaaatggctcttaagcatttgaaaacatgcgtcctcactcgtaattagagaaattcaaattaaaaccatagtgagaaaccatcttttactgtcagatgcttccaaagctgtcagattagccaggccgtggcgagaggcacaactatccctggctgaatggaaggtaaactggttgagccccaaggacagcactctggtgacacattaaaaataccaaggtggggccgggtgcggtggctcacgcctgtaatctcagcactttgggaggctgaggcaggtggatcacgaggtcaggagttcgagactagcctggccaacatggtgaaaccctttctctaaaaaaatacaaaaattagctgggcacagtggtgcacctgtagtcccagctactcggaggctgaggcagaatagcttgaacccgggaagtggaggttgcagtcagctgagatggtgccactgcactccagttcaggcgacagagtgagactccgtctcagaaaaaaaacaaaaacaaacaaaaaataaggtggctgggtgcggtggctcaaacctataatcccaacactttgggaggctgaggcaggcagatcttgaggtcaggagatcgagaccatcctggctaaccggtgaaaccctttctctactaaaaatacaaaaaattagccgggcatggtggcacgtgcctgtagttccaggtactccagaggctgaggcaggagaatcacttgaacccaggaggcagagattgcagtgagctgagattgcaccactgcactccagcctgggtgacagagcaagactctgtttcaaaaagaaaaaaaaaaaacagtgtattatggaaaacgagtaaacacgtataaatgcatagaaaatgttaaaacattttgcaaacaacccagatgtccaaaaggtgtctagttcattatactaagataaggctttacattgtagttgtaaaaaaaaaaacgcccagtggagtagctcacgcccagcacttagtactttgggaagccgaggcaggaggaacagttgaagccaagagttggagacaagcctagaaaacataatgaggccccatctctgtttctatatataaaaaaagaaaaaaaaaaccctgatatataaatctctccatatataactgaaaaaacccaagatgctgatagaggtatacaatatgttaccttgattttatatttttaaaaatttatacctcgtgatgcaagttaactaccttgatattaaaagggaaaatgcacaatatttagattgatgtttatttgcatatgcattagaaaacctgaaaggcgtacagtgaaaaagcaaaaaacaagcaaaaccaagaaaacaacaacaaaactccaagccacaagcaatggcacctgcatggaatagttctgagtttggcaaaggacagcaacaagagagatttctcacagcatcttttgatactttttttcttttttttgagacggagtcccactctgttgaccaggctggagtgcagtggcgtgatctcggcttactgcaacctccgcctcccaggttcaagtgattctcctgcctcagcctcccgagtagctgggactacaagcgcgtgccaccacacccagttaattttttatttttcgtagagatggggtttcaccatgttggccagggtggtcttgaattcctgacctcaggtgatccacccgccgtggcctcccaaagtgctgggattacaggcgtaagccagtgcgcccggccgatacttttttttgttgagtcttgtgaatagaatacatattctagaataaaataaaaagcttaaaattaacaaaaaacaagtttattccacacctacccaatttcacatagacttgaaaacactgatcatataatacgtggttttttctattgaatatttactgttcatctaaagtacctcagaaaacacaaatatgaatcttacactaggatttgttgacatgaccacaaattgtgaaatttcaaagtcctctcaatagccttccaatcctagtaactcaggtacacctggattcctgacaactctatttctttgttttctttcatcacttaggttcatttctatgggttctgttattggcattttttttttctcatatctttgcaaaaccatcctttatggtgaaagtcatgaaggattcttcacaaatgcaggaaaatgcattgctaacaaagtgctaagtcagaagtgtcttgggacctgtttgaaaacaagattcggccgggcgcggtggctcacgcctgtaaagtaatcccagcactttgggaggccgaagcgggaggatcgctcgggtccaagcgttcgggaccagcctagggatgcgagactcccttctctatttaaataatactaaaaaagaagaaagaaaacaagattcaacagtcttgtctgtttccatttcggagtgtgcttcctccttcaattgcacattgccgtattcccttccagtttgcattccccctaatgactgagttaactaaactggcacagcctgcctgttcttttgatcccaaaagggtcacttggctattccttgccaccaatgtcatcatcacagccgactcagtcggccagaggactgagggcctcggaggcagtcagcgctaccgtaaacgcgacagcagcgaagtccatctgcgggggatccgcgtcaaaggctgcttccctcgccttgcagccttccacaaacagcctgcggcgttcctcgaaatcccgtagtaatctgaccggaatcatggagctaccatccagatactcgcggaacaacagctgccggttaatttctaagaaagcgagctgctgatgggggtctggcgcggaggccaggcccgggacgctgctggggatgggcccgggcacagggcccggcatccgcgccatggaccgcgcagcttcggccactgggccttcccgagcctcctgcacccgaaccccgccgccgactgccccccgcagtacgtcgctgacgccactcgcggtgcccacctgtgggacactgctatctccggggagctcggacatctccaacagcccagtcggctccgccatagtcccagcgtttctacggagactggaataacggcactgcactgctgtatgcgagacctgcgcatgcgcgagtctcagtgagcgcgtaaacgctgtgcgtgccagagtgtgcgcatgcgtaagcacggtggccaatcctctagcgttccctagcggtcctgagtagccattacgtctgtagccgcctctggtcctctgagcgcctgaggacctgcggactgcgcggtatcttaaattacaaccacttcagtattaatgtaaagttccttatacggtcattttccagctcctgtcttttttttttttttttcagactgggtctcgccctgtcgcctaggctggagtgcagtggtgcgatctcggttactgctgctttgacctcccagcctcaagccatcctcctgcctcagcctctggagtaactggaactacaggtgcacacaaccacacccagctgattttttattttttgtagaaattgggtctcactatgttgcccaggctggtctcgaactcctggactcaagtgatcatcctgccttggcctcccaaagtgctgggattaccggcctgagccactcggcctggcctgtaagtaatattttgacactggaagtttgggggtttcccaaaaccacctttaggtttgataattcccagagctcattgaaatctgttatattcacagtcatgcttattacaggcaaaggacacagattagaagagatgtataaggcacaatctgggatggggagggttccaaatgtgaagttcctgtgttcctagggatgtgttaccctttgtcgtccatgtgtggcaataagtgtgggggtagtgctaacataggactctcacccaggctttggtgtccagagtttttactggggttttactacctaggcatgcttgattaaaccatcgtccattttgttgaagtcaatctccagcctcctacctgatatcacatggctccaagccccaactctctaatgatatggttagcctttctgtgtggctagctctgatcctgatgataacccaaaacgtgaaagtctatgttccatttaaaatcagtcagctgtggctgggtgtagtggctcatgcctgtaatcccagcaagttgggaggcaaaggtgggaggatcgcttgagcccatgagtttgagaccagcctgggcaacatagtgagacccctgtccctacagaaaaaaaaaattaggcaggcatggtggcatgtgcacctgtagtctcagctattcaggaggctgaggtgggaggatgacttgagcttggtaggtggactgtgcagtgagctatgattgcaccactgcactccagccctgtatgacagagcaagaccctgtctcgaaaaaaaatcctttgaatttagctggaatccaaatatgagagttgctggcaattgaacttcaggaggatccatctaaaaattctgacctatcacaggtcgtgtctgggagctgattgggttggaaatcattctgactcacgtgtaccttactttgtttctacagttctcttggagagatggagttctcctacatgtgacatatatgcttcaaaaagcacatttgtgatattccacagaagacaaaagaaaggacttctctggaaggtaacttcaaggggacaacaacagagctatggactgcaggaagatggcctgcttctcttccagtgtgatttggatcatggccattttgaagcctttgaactgggattagttgctgggctgggtcatcaggaacttgcgtgtccatctcagggagacctggccttcagaaatgacagcattcggccccaggaggagcctgcaattcggcctcagtcttcccagcgtgtgctgcccatggggatacaggacagtaaggagctaagcagaacctgctgcctgaatgggggaacctgcattggggtccttttgtgcctgccccccgtccttctatggatggaactgtgagcacgatgtgtgcaaagagaactgtgggtctgtgctccatgacacctggctgcccaagaagtgttccctgtgtaaatgctggcacggccagctctgctgctttcctcaggcattttactggctgtgatggccttgtgatggatgagcatctcatggcttccaggactccagaactaccaccgtctgcatgtaccacttttatgctagctggcatctgcctttctatacaaagttactattaattgacactgacctatttccagaaataccattttagatatcatgcaaatttcatgaccagtaaaagctgctgctacaatgaaagatgatcatttgttagtttacttaaaataatgagtatatttccaaaatggtctctaacatttccttacagtatcaacaacttcttacttctttgccctgccctctcccaaaaaacgacttcttttttcaaaagaaagtcagccatatctccactgcacccaagtccagtgtttctttctttttttgagatggagtctcgctctgtcacccaggctggagtgcagtggcacgatctcagctcactgcaacctctgcctcctgggttcaagcaattctcctgcctcagcctccccagtagctgggattacaggcatgtgccaccatgcacgactaacttttttgtatttttagtagagaccgaatttcaccatattggcgaggttggtcttaaactcctgaccttgtgatctgcctgccttagcctctcaaagtgctgggattacaggcgtgagcaactgctcaaggcctcgtgtttattgatacatgtaattctaccaaggtcttcttaatatgttcttttaaacgactgaattatatcttcagattattaaagactaatcttaatgtggaccttaggatacagttttgagtagagttgatcaaaatcaattaacattgtctctttaaaaggaaagacagcctctttaaggcgaggaaccagagtgatgaaggaatggaagtctgtctgcatgtgtgcagggagactgggtaagaaagaggaagcaaatgggagagagaggttggaaaacataaaataggttatttaactggtgattaggtgggtgtagagaagcaagttaaaaggctaaatggaagggcaagtttccatcatctaatgaaagatatataagacaaggactcccctttttttcctaaaggcattgtaaaaagaattgatttttagacggagtctcgctctgtcgccaggctggagtgcagtggcgcaatctcggctcactgcaacctctgcctcccaggttcaagtgattctcctgcctcagcctttgtaaaaagtctttttagaaaaaatattatacctcaatgtccccaacaaaattgcttaataaattatgcttcctccaagctatgcaattcttttaactgttgtagaagagaaaatgttcagtgtatttagttgtaaaccaagtgataaaaccacatattgtaaagctcatttaaaaaatacattgtatatatgtgtatgcacagtaaaaatggaaaatatattgaaaaaaaatttgatccttatattgtacctgagaataaatttcaaatggctcaaagattcaaatgtggacaatgaaaccacacacacacacacccaagactaccttaggattcaaaatactgcaggtttatttattttttattttttgagacaggatctcactttgtcacccatgctggagcttgctgggctcaaacgatccttctacctcagcccccagagtagatgggattagaggcttgtgccactacaccaggctaatttttcatatttttcatagagacagggtttcgccatgttgcccaggctggtcttgaactcctgagctcaagtggtctgcctgcctcagcctcccaaagtgtgggattactgatgtgagccactgtgcccggcctcctgcaaatttaaaggaaaataggcaacaaaaattaccatggccaaaggctttccaaaaagccaaaatctaatgacaacttgtgaaaaaatattcgtaactcatatcccaagctattatcatacctcatatcactaacatgagtatcataaatagctactggattcaatgaagaaaggacaaaattatctgggaggggaatggataaagaatatgaacaaggcatggtggctcacacctataatcccagaactttgggaggccaaggagggaggatcatctgaggtcaggagttggagactagactggccaacatggtgaaacccatgttaaaaatacaaaatgagccaggtgaagtggcatgtgcctgtaattcccgttatttgggaagctgaggcacgagaatcgcttgaacctgggaggcggaagttgcagtgagctgagatggtaccactgcactccagcctgggcgagagagtgagactttgtctaaaaaaaagagtatgaacagagagtttatggaaaagggaatatatatgactcttaaaagatatttaactggctgggtgcggttgctcacgcctataatcccaccactttgggaggccgaagtaggtggatcacctgaggtcaggagttcaaaaccagcctggccagcatagtgaaaccccatctctactaaaaatacaaattagccaggtgtgttggtgcatgcctgtaatcccagctcttgggaggctgaggcaggagaatcccttgagcctgggaggtggaggttgcagtgagccaagatcgcacaattgcactccagcctggacaacaagagtgaaactcccatctcaaaaaaaaaaaaaaatttaacttcgctcatcataaaagcgaattaaaactgatataccatttttcaactatcagattcgcaaaagccagatattattgatgatttagtgtgttggctgggctgtaacgaaacatctatgatcattaattgctggtgggagtgcaaagcaggacacatatagaatgctgcatagcaatattcataaaatctcaaaggagtaactttggcccagaattctcatttctggggcatcagcctacagatattacatgtaaaaaggaatctaggtagctattgatcatgagacacatcattagggctgggcgcggtggctcacacctgtaatcccagcactttgggaggccaaggtgggcagatcacaaggtcaagagatcaagaccatcctggccaacatggtgaaaccccgtctctactaaaaatacaaaaattgaccaggtgttgtggtgggcgcctgcagtcccagctactcaggaggctgaggcaggagaatcacttgaacctgggaggcggaggttgcagtgagccgagattgcgccactgcactccagcctggcgacagagtgagactccctcttaaaaaaaaaaaatcactagtttcgtgaaaacccaaggaaaaaatgatctattacagcatcaaatataagatgcacccacatttcagagatgttcaaatatgaagtgaattttgaattgaagcaatactatatttgtgcacatgccacatgatatacaagatgaactactctagcaattgtacaagatgaactactctagcaattttttattctgcccaaagaaagagatgggaaacaacctaaatgtccgtcaatatatccctggttaagtaaatttggacataacctcagaatggaataaaatgccactttaaaaaataatgaggaaatacagtggtttggaagggtcaacatatgttcttaatgagaaagcaatgtataaaccagtaaatataatatgccgacttctgtgaagaaataaaacaagtaaacccagatttatatgtgcctgtgtacacgtaaggaaactagaaggacggaaaggaaactgtggctattagaggtcatcgttggtactggatggaggaaaacaagaatggaaggcttttcgctgtatattttatatattttttggcttgtgaatagattttttaataccaaaaaaactttaaaaattaaaaattgaaagaaaaaagtccagaaatttgacgttcttgaaaacatgatttatcacataatatatacatttactttgcttgtcacttgaaatgcctaagaaaacacaaaatcaatcttaaactagaaacttctattgaatatgacatgaagagagcacatattccgacaatttcaagttcttttcatagccttccagtcctaataactcagcgttaacatcttattctgttcagcactatttgataatttctttcatcctcatgggctctagtattgatgtttcatcagtctcaattttataaaaccatcctttactttgtaataaagcaatgctgagagacattttccataatgcagggggaaaaatgtggatcaatcacaaactcaaagaacgttacagttataatgctttcgacatttttttctacttctgtgatgctttttcaagataagcttccccctccccctttttttcccctccacctgtgcactgtcttatcgcgatatactcttgacttctgaaaatcaagttgcaggattggtatgactggaatgcagaggttctcttgaagtagtgtcaccacataactattctctattgataaacttatcgcaaccaagttcttctatcagagggttgataacttcagaggcagtcagagctatcgtaaaggttaaaatatcgaggtccaccctgtgaggatttcgctgatattcggcatcaaacgctgcttcccttgctctgcaggcttccacgaatcgcctgcggcgttcttcaagctcttgtattctgccgggagcaatcgggtaattttccagatagtggcggagaaactgctggtaattgatgcctaaaacgctaagtgggtggcggagacggagatagggcaacgcagccaggcctccgttcccgtgtctggacctgggcctgccctcgggaccctcttcgtccactggctcccccagcaagcgggcgacctccgccatccgggcttccctggccgccgccgccgccgggctttccctgcccgccgcggctgccctggccaacgccgccgctgccaccggggctcccctggctgccgccgccggggctgccctggccgccgccatccgaccttccctggccgccggcaccgggcctcccctggccgccgccatcgcgccttccccggcctcctcaggctgtgccggggccggctcccgcctcccgcggcctacctccgcctgcgggacgtctctgtcaccattcgccgcgcctgtctgcgggacactgctgtctgcgggcagcttggacatctcagaccgtggggtcaactcggctgctcccagagaaactggaataactggacagagcgatgcccggcggacaccccagtgcgcgtgcgtgggcgctatgcgcgctgtaaatgcagtgtgcgtaaccgggcgcgagagcatagattcttaccgcaaaccctgggagcagtgcgcatgcgtactttcccggcgcccgccgttctccagatgccccctcgaggccgggaagcgccaacgcatctgaaacatcccaacgacgaagggcgggggacatttcaaccagtttgatgtttatgaggaacgcttacaagatcgcttcttgtaggcgttctcaaggttctgtcctagggtgtttctctttgttctccagtgattatgtgccacctctattatatatcaagatattttagattcatggtcttttctggatttttaaattgtttttcattcattcctttgcctgtcttcatccatacggatcgtcctagctaccaaagctttgtaattacagtcttttcgtgttatctttaacattgcattgactaccttggacatttgtttttcgaatcttatttgtgcaatataacatgcagaaaagtaaacaaaacataaatatacagctgaatgatttatcacaaagtgaacatccgtttaactaccacacagtccaagaagtggaatatttccagcatcccagaacccttcctcttcttcttatcactatcctttcctttctacgcagaagtaacaactatgctgatacttatggtaatcactttcttgtttttcttttcattttaccacctaagggtgcattcctaatgctgtagtttagtttggtttgtattctgaactttatctatgtgagaaacacactcacctgcgtaatttttgtatttttagtagagacgaggtttcaccatgttggccaggatggtctcgatctcttgacctcgtgatccgcctgcctcggcctcccaaagtgctgggattacaggcgtgagccactgcgccggccactttcttcccttttatgggctgaccccgcctctacattctgttcccttattgtgaccttctaggtggatgagccctgcagtttgttatatttgcaggctggctgccagtacttagatttatcatgcctcagaaatggaccatttaaaatgttttctcacatacacacttgtatctgtttttttgtgcattatttttatgagattcatccattcacattttctcttcctccctccctccctcactcccttccttccttccttccttcattccttctttctttcatctcattctgttacccagactggagtgcagtggcacaatcacagctcaacgtggcctcaaccttccgagctcaaataatcctcccacttcagtctcctgagtacctgggactacaggtgtacaccaccacacccagttaatttttaatttttttgtagagacagggtctccttatgttgcccaggctggtctcaaagtcctgggctcaaacgacccgcctgtctcagcctcccaaagtgctgggattatagggtgagccagagcactcggcctccagcctacattttcattatggtttataaatactttattttcttgatagttattatattcattaccattttttttatgaagtctcgctctgttgcccaagctgaagtacagtggtgtgatcttgggtcactgcaacctctgcctcccagttccagtgattctcctgcctcagcctcctgagtagctgggattacaggtgcgcgccaccatgcccggctaatttttgtatttttagtagagacagggttttattatattggccaggctggtctcgaactcctgacctcatgatccgccaggctttggcctcccaaagtgctgatattacaggcgtgaaccactgtgcccggcttattaccattcttttatggatcttgtaatattaaaacatgcatcttatatactgactctccaattaatttccctttgttctgattaatgtgaacaaacaaaataatttgatttgattttgctggtggtggtccccgtcatgatgccatgattcatgaccatcaacaaatgacttaagtgacttatcgttctctgccctatcagaagtagctattctgaggcagtaaggtctcatccacagagcacaagactgcattttaattttcctggtccaagcaccaaattaataaaacacaacagctagtctacttgctgcttcccaccagcatctctgcaatcactaagtgtgcggctcctttaaggcagctcccaggctaggctggagacagatctattgttctcaccctcaggctgcctggagagtcacaaatatttaacaaaggaagttccagacttaggtgacaacatatattatcacaggaagaagtagaaatcatagtaatttgctgtaatcctacagaagcggatataatcttgttctctggactaagagtcaccttacagcagaagctgaaaggccctctgattttctaagaatagaaattgctctaagtaaaatgatggtttattagatccggaagtgatataaaaatggttctaggaaaatgaagtgaactaaaataagaagctacaaatagaggaaggcagaaaaacttggtgataatgtgaggggatacaaacaaaaatttgagaggtagtccaggtttgctgttgctcccaagactgtgcctgcggtggctgcagcatctttgtaattcactgccactatttcgggatgacttgaggatgattgtaaccatgttgtagactaaaccattaaggcagctgggatcaggggctccatattgcttaaaatctttacagcagaggtgtgtgtgtgtgtgtgtgtgtgtgtgtgtgtgtgtgagagagagagagagagagagaatttgaatccaattaatatatatattttgagagagtctggctctgtcatccaggctggagtacagtggcgcgatatcttggttcactgcaacctccaccttccaggttcaagtgattctcctggagaatcccgccactgcactccagcctgggtgacacagtgagattctgtctagaaaaagaaaaaaaaaagacatagattcttggctgggcgtggtggctcatgcctgtaatctcagcactatgggaggccaagacaggaggactgctcgaggccaggatttccagaccaggcctgggcaacatagcaagaccctgtctctaaaagaagaaattagccagacatggtagtgtgtggctagctactcaggaagctgaagcaggaggatcatttgagcccaggagttcagggctacaatgagccatgattgtgccactgcactccagcttggatgacagagtaagactctgtctcaataataattagaaaaaagaagtagattttttttctccatcctttgaatgagaactggtttatgacttgtttgacccataagatgtggtagaaatgatggttcatcagtttcaagactagtgctcatgaggaatttcatacttctcattctctctctaactctataactcatctccaccatgaggacaagtctggaccagctttctggagggtggaagaccattcagagtggaggaatgtggtctcagacaaggcattcaaaatcagtcagtctggctgggctcagtggctcacgcctgtaaacccagcactttgagaggccgaggtgggcagatcacctgaggtcaggagtttgagaccagcccggccaacatggtgaaaccttgtctctcctaaaaaatacaaaaataagttgggcttgatggtgcgtgtctgtagtcccaggaggttgaggcaggagaatcgcttgaacccaggaggcaaaggcagtgagccaagattgcaccactgcactctggcctgggcaacaaagtaagactctgcctcaaaaaaaaaaaaaaaatcagtcagtccccagctgacctaccaactgactcttagatgcataggctcaataagtgcttcttgttttatgccacagtgtttgatatgatttgctatgcagtatcattgtggcaatagataactgttagctaacggttgcagaaattggtaccaggagctgggcactgccctaacaaaatcctcaagtatgtgccagtggccttggcactgcatagtggatgaaaggtagaaaatcacaaaggaaactgttagcaaagctgcagaatagtgagaaaattgttattggaggcagaaaaactggtgacctatgttatgatgtagtgaaacgattgctaaactatcgcccgaggttacttagaagatggaaagtatttctgatgaactgttgtatttggataagggaacctccagacataatgctggctgctcatgtggctgagtatgataatgcataccaagagtggggtgaactataggggttgactgattttctagaagaattcaggggaaatacagggggactatgacttgctaggatggaaaagaaaactttttctcacttccagtctctccacccacaattttttttttttttttagacagagtctcactcgctctgttgcccaggctggtatgcagtggggcaatcatgactcactgaagccttgaactccctgggcttaagtgatcctcccgcctcagcctcccaagtagctgggaccacaggcatgtgccaccatgcacagctaatttttaaaacatgttttgtagagatggggtcttgccgtattgcccaggcttatattgaactcctgggctcaagccatcctcccgccttggcctcccaaagtgctgggattataggcatgagccatcgtgcctagccacaaaagattatcaaggtgaaaaaaagcctgtgaatatggatcaaattaaaggtgtggccttctgaccctttgttatgactgttgaaaatacaaaggtagtgcttggtgaaaagccgaccagtcagacaaaagggtttctaggaagctttaagggcatgctccctcagaaaccagatcttaaaacaggaagaagttggtctagagagagagggtatttcttgaaaacaatagtgatgtggtttctggaggatggagtgaagtataagcagataaatagcaagcttacaaagtttgaaagggaattgtataggcaggactgccagcatagactttaaaattttttattatgtacttttttttttttttttgagacaggttctccctctgtcacccaggctggagtgtagtggcacaatctcagcctcgctgcagcctccgctcttcaggctcaagtgatcctcccacctcagcctcctgagtaactgggactacaggcatgtgccaccatgctcggctatttttttgtatttttaatagagatgaagttttgccatgttgcccaggctggtcttgaactcctgagctcaagcaatccacctgccttggcctcccaaagtgctgtgattataggtgtaagccactgtgcctggcccatttttaaattttaattcttggctgggtgtggtggctcatgcctataatcccagcactttgggaggttgaggcaggcagatcaccggaggtcaggagttcaagaccagcctggccaacatggtgaaaccccgtttttactaaaagtacaaaaattagccgggtgtggtggcacatatctgtaatcccagctactcaggaggctgagacaggagaatcgcttgaacctgggaggcggaggttgaggtgagccaagtttgtaccattgcactccagcctgggcgacagagtgagattttgcctcaaaaagaaaaaaaattaaattcttttagaggcagagtcttgcattgttgttcagactgaacacgaataatcagattgtttgtttccttgctattgagttgtttgagttccttataaactttggatattaacctattatcaaatgtatggtttgcaaatcttttctcccattccataggttgtcttttcacactattgattgattcatttgatgggcaaaagctttttagtttgatgtaatctcacttgtctatttttgcttttgctgcctgtgcttttggggttatatcaaaaaaaaaaaaaatagttcagatcaatgtcaatagcttttatcctaagttttcttctagtagttttacaggcttaggtcttatatttaattgtttaatccattgtgaattgatttttggatgtggtatgagatcagggtccaatttcattcttctacgtgtggactttccattttcccagcaccatttactaaagagattgtcctttccctattgtgtgttcttggcaactttgtcaaagatcaatggactctagatgtatgcatttatttctctcttctgttccatgggtctctgggtctgtttttatggcagtaccatgttgttttgattattctagatcatactgaagactctgactctgagtaggatggtatgactgatggaagatagtcgcaaattcttggacactcttccccttgatgggtggagtttagtctctctcctcttgaatctgggctggccttaggcagtcacttgtgatgaagaaaatgcagtgaaagcaacgctgtgtgacttcagagacgaggccaaaggcactcttgtagctctgagataggaggtgggacctgactccataggcggggcttggacactggaccagactgaagactaggtaaaacagggccgggcaaaagcagcttttaagcagacacacccatcagtgtaccatgtcaatttactgttgccatgacaacacccaggcgttaccacccctttccatagcaatgactcaatgattactaccccttccctagaaatttctgcataaaccgtcccttactctgcatgcaattaaaagtgcgtataaataggactgcaaacggcctgagcagctactctctagccctaccttgcaggagcagtcaccgagctgtaacatcgcctcttcaataaagctgttttcttctatctctggcttgcccttgaattctttcctgggcaaagccaagaacccagcgggctaagcaccactttggggctcctggccctgcatcagcttctgccttgctctcttctgccttgcctgctcttcagaccttctctcttgggttgcttcttctaggaacccggccctgtgaaaagcccaagccacagggaaggccacatcatgcgctcttacttttcttccaccttattggccactctcaccatcattgctgcatttattccagcactactctatgtcaaaaagctttacacacataaggtcatctaatcttcatctaatgatctctgttccacctataatcccttcttatatactttgtattgattttgcagaacatggaagcatatctctaatggacttcaagctctaaaggacatgaaattgtctccatccttcttctcttccccttgcttggtagcagttgaaggacacccaggatctcagctcaggggaaaacagaaggtcatactggagtctgagaacccttagtataaactctctaactcctggaaacactgttaagaattattgaaagcgtggaaataaggctggtctggaactcctgacttcaggtgattcgcctgccttggcctcctaaagtgctaggattacaggcgtgaaccactgcgcctctctggaatttgaccgtttatgctaaggcatgttgaggcagattttagcctcaggtcttccaggccaatggacccctcgcttctaaaagagttccagcgttgggttctgatcatgtcccagttttttgtttttttttttttaatagagacagggtcttgctatgttgttcaggctggtctcaaactcctggctcaagcgatctcccgcctcagcctctcaaagtgctgggattactggtatgagccactgtactcagtttatgtcccagtcttattggttcctgggggaggaaattgttggttccaggtgtagttagaggtcaaaacgttttctattttgcatgctcaggctacatgacttgcaattttggttctgttaaacctacaaggtaactttattattattattttttgagatggagtttcactcttgttgcccaggctggagtgcagtggtgcgatctcggctcactgcaacctccacctcctgggttccagcgattctcctgcctagccttccgagtagctgggattacaggcatgcgccaccacgcccaactaattttgtatttttagtagagtcaggggtttctccacattggtcaggctggtctcgaactcccaaacgcaggtgatctgcccgccgcagcctcccaaagtgctgggattacaggcgtgagccactgtgctcggccaacattttgttatcaacagaataggcccagtttgggctggtcccacagctacagcatcctttattcagtttatatatcctcaatttctcaaattttctttgagccagttttaccatcttgccagctccctgataaatgagttaaataagtctctgaaccatgggtcacattgtatttacatgagaattttttttaatttttaattttttttttgagacagagtctcactctgtcacccaggctggagtacagtggcatgatctcagctcactgcaacctctgcctcctgggttcaagtgattctcctgcctcagcttccccagtagctcatagctcaacctcctaaatagctgggattacagggatgtgccaacacccctggctaatttgtgtatttttagtagagatgggggtttcaccatgttggccaggctggtctcgaactcctgacctcaagtgatccacctgcctcagcctcccaaagcactgggagtataggtgtgagccactgtgcctggccagccttatacatgctaaagaacattacctgcttattatttctttatttgaagataaaatcaacttaggccaattcatcatttttttttcttttttgaccctgagtctcgctctgtcacccaggctgtagtgcagtggcactatctcggctcactacagcctctgcctctcaggttcaagtgattctcttgcctcagcctcctgagtagctaggattacaggccccagccaccttgcccggctaatttttgtattttcagtagagacggggtttcgccatgttggccaggccggtcttaaactcctgacctcaggtgatccgcctgccttggtctctcaaaagtgctgggattacaggcatgtgccactgcgtctggctcatcttttcttttagtgaaagaaataaaatgcaagaacagaacttatcctaaagttaaatcatcctagttcacaaaaggagcctgaaaatgatagaagcataaggtataggagaagtcctttcccctaagtcactgctgcaaacagatcctggaaataaatatttgcacataaacctctaagtagaggccatgatcagaacccaacactggaactcttttagaagcgatgggtccattggcctggaagacctttccctgcagtttgaagaggaataaataccacctcaaataaggtgatttgaaaaggtgttaaacaggcagggcgcaggggctcatgcctgtaattctggcactttgggaggctgaggcaggagactctttgaagccaggaatttgagacccacctgggctacacagccagactctgtttctacaaaaacacacaaaaattagccaggcatggtggtgcacacctgtgtggtctcagctactacataaggatgacaaataaaaggaataagttggctgggtacggtggctcacacctgtaattccagcactttgagaggctgaggtggcagattgcttgaacccaggagtctgagactggcttgggcaagatagcaagaccttgtccttattatttaaaaaaataaataaaaaagaaaagaattacctatggtatttttttttaattagaaaggcagccaacttccagaagaaaaataataaaataaaataaaataaaataaaagccaattaaatcccttgtaggggccaagggctttggtcctctcaaggttgctgacaaatcaatttgcaaagggcagattaattggagaaaaggcatacaaatttatttaacatgtatacacaagcactttcagattgaagactcaaagatacaggaaaaatggttcatttttacgcttaggtttgaaaccacttttgcatgaatgataacagtgagaaaattataacagtggaagagatctgatctaaccaatgcccatcttgcgattgtttttcttttggttttgttttcgagatgatgtcttgctgtctcctggtctggagtgcaaaggcacaatcatggctcactgcagcctcaatctggcgacactcccacctgagcctaccaagtagccaggactacaagtgggtgccaccatgcccggctaattaattttttttttttagtagagataatcttgatatgtttcccaggctgtttttgaactcttggcctttggcaatcctcccccagtctgcagtctgcctgctttggcctttaaggtgctagaattacaagtgtgagccactgtgctcggcctcctctccttttttgtggctatcttgacactgagtttttgcgtagtccaggccagttgttttgtataacatcccatacttctgggattgtctgattgttttttctttttttttttttgagacggagttttgctcttgttgcccaagctggagtgcaatggcatgatctcgctcactgcaacctccacctcccagcttcaagcgattctcctgcctcagcctcccgagtagctgggattacaggcatgcaccaccatgcctagctaattttttgtatttttagtagagacggggtttctccatgttggtcaggctggtctcaaactggcgacctcaggtgatccgcccgcttcagccttccaaagtgttgggattacaggcgtaagccacggcgcctggcgtctgattgcttccttatgattaaactgtcctttcccctaagtcactgctgcaaacaatttctggaaataaacatttgcacataaacctctaagtagaggccaggactcagccaggcgcagtggctcacgcctgtaatcccagcagtttgggaggccaaggcaggtggatcacttgaagtcaggagtttgagatcagtctggccaacatggtgaaaccctatctctattaaaagtagaaaaaaaaattagctgggcgtggtggcacatgcctgtaatcccaactactccggaggctgaggcaggagaattgcttgaacccgggaggcggaggttgcagtgagccaagaccgggccactgcactccagcctgggtggcagagtgagattccacctgtcaaaaaaaaaaaaaaaaaaaaaaaagaggccaggactcagagcatcctggtaacggttgtgcagaatccacactccagctgggaacactggggaaagtggagcccaccgttttctctctccttactgtcgggtcaggcttctgcccactagagggcagccaagtcaaaatcttgatagaaacaagttctaaagacttacccagatttgctatctcttctgagatagtgttttttttttctttttttttcctcttttttttttgaaataaggcctggctctgtcgctcaggctggagtgcagtggcacgatctcggctcacggcaacctttgcctcctgggctcaagctatccccctgcctcagcctcacgaatagctaggattacaaatgcatgccaccatgcccggctaatttttgtagagacggggtttcaccatgttgtccaggctggtcttgaactcctgggctcaagagatccacctgccttggcccccgaaagtgttgggattacaggcgtgagccatcaggggcggccttctgagattgttaatgtgaaaaattctatcgaagttgtctatcaaagttgtcatccaccatttgtctcttatgagtgttcttttttttgagatggagtcttgctctgtcgcccaggctggagtgcaatggtgcgatctcggctcactacaacctccacctcccaggttcaagcgattttcctgcctcagcctcacaagtagctgggattacaggctctcgccaccatgctggctaatttttgtattttcagtagaggtgggtttcactatcttggtcaagctggtctcgaactcctgacctcaggtgatccgcccacctttggcctcccaaagtgctgggattacaggtgtgagccaccgtgcctggcccttttgagtgttcttttgggaccctgtcagagcaacttactaagtacttcctctattgttaacttgttgagttgatgtctcctctgaaattttgtgtatattttgaggagatggactatttctagaggtctctccagaactgaaactgtggtttcctgtaagtctacgaatactgacttctcttttttttccctttgagacaaggtcttgttctgtcacccaggctggtgcaatcatgtctcactgcagcttcgacctcctgggctccactgatcctcctacctccgcctcctgagtagttgggacaataggcatatgccaccatgcctggctaattttttttgtttttggtatattttgtagagatggggttttgccatgttgcccaggttctgacttttaataaataagaaatttggtctctgtatctttcttttcccctttatacttcactgaagaaaatgaaggtgggcttcttcatggggctgggccagtaaaattaggctacactcatataagcatttccccaaatcctcctaatacctcttgtgaaaaagggtatctgccacataataccatcaattctgtgacaaattattctaacccgctggttctccatcctgtctgcacattgaaatcacaggggaatgacatctactgatgcccctgtctctctctcagagattctgagtggggagggaatttgtgttggtgtaagtgtgtgccccacaagggaaggacctgcccaacacaccgtgtgctttgccctcagcaaggagccacagctgcaggtggatttccacaccgggatggatgaggactcagacatcgctttccatttccgagtgcactttggtcattgtgtggccatgaacagccatgagtggggggtctggaagtgtgaggtgaaatctgacaatatgccctttgagggtggccaatcatttgacctgcgcatctgagtgctggacaaggaggaccaggtgagcaccccaggagctcccagcatgcagcctctgtggactcccagagcaggaggtagctctccctgccctggccccaccagtccctcgggacccatctcccataacgactcctgccccaggcttttcatcacagagcaccctctgcttgcactgccaccctcagctctttcccaaatctgaccaaggtcaaggttggttcacttgccatttcccccaaggtggagaatcatttccatagctgtcatttctgctcatgctgttatttacattttcatgtggccaaatagacaaaatacatgtatgaatcaaattattttagtcagtcaaaaattaactcttcctttcactcccgaacctcactcctactccccagaacaacactaccagcttctctgctctccttccagagataatctaccattagagaaccgtatatttcctcttcctcatttgtataatatgctttcattcctttttgtatatatgcctatacacatattcatatatacatatatgcatatatgctttcatttctttttaaacaaatgctgttataaatgtctttgtacattacactttggaaactagagtcgatttatagtcaaagaacatatcttggagaattcatctatctatggtgctgcttcatttttcttttttttttttttgagatggagtttcgctcttgttgctcaggctggagtgcaatggcgcaatctcagctcactgcaacctccacctcacaggtccaagcgattctcctgcctcagcctcccaagtagctgggattaaagagatgcaccaccacgcctggttaattttttgtatttttagtatagatggggtttctccatgttggtctggctggtctcgaactcctgaccttaggtaatctgcccgccttggcctcccaaagtgctggcattacaggcatgagccactgcgcttggcctgctgcttcattttttaaagattgcataatatgccagtagaaggatgatccaaaatgattgaacttgaccgttttgatggttactgcgtggtttttagtattttgctctcacaaagggtgctgtattaagctttctaatcaactcttttgtaattatcaacctaccaatacttacattggaggatacttgcaaagacataaaataattggttgaaaattgtgtgaaaaatcttaaaatttcataaattaatacctttaagatgactttcttcatagctacagcaatacagattatattgaaattttctcaccttctctaacgggtaggccaaaaggtgaacattttattcagctctaagtgaggcatctgttcatatgcctactataggctgctaaaataatatcctatgttttgcaacatctgtcctgttcctcctctctaagaacacttgggtttcattcttggccacctccagcccagatctgggctactccaaagagaaactgggccatcagcagtgaatgggagtcacagttggtggaacttaaaagtacccattcaataaacattgtcaagcactaacctcgtggcaggccctgtgcaagatgcaggaattcaaggtcaagagacacaatccctggccatggggatcttccaggctagaggggagatccagcaaacagggaccacgtgacatagaggggtagagcctcactggaagaatgagaggaaacattgaaaatgcagtgagcaactgtctcagatagccacaaaatgtagtctgtaaacagaagtgagtctgccgggttttgatgtataattaggagttttctgggtgggtgttgtaggtactagggcagagtagagaggaggctgaaagcttgtttggtgaaatactgtctttctgatgcacttttcctcttgcaggtaatggtaagtggccaacactgctacagctttgcccatcgactcctgccagggtctgtgaagatggtgcaagtgtggagaggtatccccctgacctcaatgtgtgtctgagattgaggtgatgaccacactccccactgtcgaggaatctctctttctacgtgaccatgcggttcccagagcctgctgacagcatgatccctccttactccttcccctacacttgctcattaaaacttcaccaaacttcacaggattttggcttttgcttgaaggggaaaaagcaaaagtggtcatcaccaagagggcctgaggggtttcatgggaggcatcaagaaatcaaagagaataaagcttcctgtggcacaaggagtgagtgacaaggtccctggaatgtctgacatgacattaggaacaacgtccatctatagcatgtagttgacttcagagactctgacccaaaatcctctgatttgggtcaaacccaaatcagagatttatctgacccattaatcctccttccttcttgccctttctccttctgccatgggatgatgtggcacaaaggccctggccagatcccagctctgtgctcatggattttccagcctccagaattgtaagccaaataaatgtttgtttgttataaatcatccagtttgttatagcagcacaatatggacttagatggtggtgaagcactgttgcaggcctggaggacagaaatcactggtatagggagaaattctacaagttgacccagaccctaccaggggcttacctccagcccagtgcctgaatatgctgaggcaagtgaaccaggaggaactgagaacagaatccaggcttcactggctgcctctgtgttggtgacagcagaaagacgagtatagggtggtggctgtgagatggcattgtgccatgggaagaagtagaccaagaagtgtttcctgggcactgaggagtgtcttctatctcatggtggcctctttaccagcacagctgaccagtgcatgggtccctctacctctcaagatacaggcacagtgataagaaatagtgcccatgtaggtcctggagaaaaaaaaagtcaaacccaagatatgtaacctccagaaatgactttggaagtgcctttatttatttatttattttcagatggagttttggtcttgttgcccaggctggagtgcaatggtgcgatctcacctaaccgcaacctccacctcccggattcaagcaactctcctgcctcagcctcctaagtagctgggattacaggcatgcaccaccacacctggctaattttgtatttttagtagagacagggtttctccatgttggccaggctggtcttgaactcccgacctcaggtgatccgcccacctcggcctcccaaagtgctgggattatagacgtgagccaccacgcctggcctagaagtgcctattttattgtgtccaacacttgacccctttacaaagctattataacagtgtggtgcttgcttaaggagaggcacatataccaatggaatataatagggagcccagaaataaacactcacatacacattcatgtgagagtccacagtaggccaagaccatctcactgggaaaggacagtcttttcaacacatgatgctgggaaaactggacttacacatgcaaaataatatggttggggcctttatcttataacatatacaaaaattaactcagaatgtatcacagaatacatgtaagacctacaacgataaaattctttgaaaaaaacatagacgcatatcttcatgacatgaaatttggcaatgatttcttggggatgactccaaaagcacaagtaacaaaggaaaaaacagataaactggactccctcaaaactgaaaacttcatcaaaggccattctggaaaaagtaaacagtcaactcacagaatggaagataatttgcagatcagatatctgataagagattattatctagaatagagaccttctacaatccaacaacaatggcacaaatactctcccgatttaacagtgaccaaataacttcaacagacatgtctccagaacagatataaaagtggccaataagcacatgaaaatatactcaacttcagagtcattagggaaatgcagaatcaaagccatagtgagatagcacttcactctccctaggatggctgttattttaagatgcaaaatcacaagtgttgtgaggatgtagagatactgtaacccttgaatgttgctgttgggagtgtaaaatggtgcagctgctgtggaaaactatatggcagttcctcaaaaaggtcaccatgtgatccagcaacagcacttctgagtatacaccctaaagaattgaagaaagagactcacgctgatatttgcacagcaatgttcatagcagcatgattcacaacaggcaagagatggaaacaaccccaatttccatctacagatatacgtacgatggaagattattagccttaaaagtggatgacattttgacgcttgctatcacgtgaatgagtctttaaaacatgctaagtgaaataagccagactccccctgaggctgtaggtgcaggctgtggggagaaggtaacggggcaggagtaggggctatggacatttggacccttcctcctgcagctttcttgtgccttcaggacctgtgtaagcctgatctctctgcccagtgagtccccacttccatcctgaggctatttggtcagtgtcaggttgcaaaagacacacaaccatgaaatgtgacttgacagatactctgcagtactttcactttcagatagctctggctgaacttgcaacctaaatacaaataggattttgtttccttttcactgctagttatgattttcaagaaatccatggtttagaggaaaatgattttgtaatttgtgctgaattctgatgcatgctatcttgtcagtatttcagatgaaagtgatagaaaagacacttgtttattgagggagcagttagcaagccactcagagtagatacacaatggcctgccctaagtgaactggtgggaaataagagttgcttgatcgttgattttttatgaaagtagagcctaggactttccgtaggtgtgagaaagtgtgtgatggaaagaggaggatcagggatggtgtggaggtttctgacctgagagaggggacttggggacttcagtccccacatccatcttgaggttattcactcagtgtcaggttgcatagaacacacaaccgtgaaaggtgacgtgacaggtgctctgcagcactttcacttttagatagttctggctgaacttgtgatctcactaaagatagaaatagattttcaagaaatccatggtacagaggaaaataattttgtaatttattgctggattctgatgcatactatctcattagtatttcagacagaagtgataggaaggacacttactgaggaagcagttagcaagacactcagagtagacacacaatggcctgccctaggtgaactggcaggaaatcagagtcactctatccgtggttggcttacgaaagtagaaccataggactttccacaggtgtgagaaagcgtgtgagggaaagaggaggataatggacggcatggaggtttctggactgagagaggggatttggggcatgaataactgagagagtagcagggtgggaggggctgtgtcggagctgagcagggctgagtgggagtcatggtctatactgaaagcagagtagggatctcatggggactctcttccttctacctggaccccaaaactcacaggtccctccactcaaccaggaaaaagaagagggaagctcatatgctcttcgccctcagttcaggaatggggggtgaaccatttcatttctggaaatgctgagacccagatttagcaaagaccaatttcctcatttaaagggtgcacccacatgaccatgccctcctcctatcctccttcctgacttaatgggagaagtcgtgtcacagaggaggggctgaagcctcaaataatggacagggcagtcagtacttttcagagcgtaagtcttggtcagagataaatagaaggcaaaccctttgatcaggatacacaatgacatggcttcatgacaggcatgccaaatacatttctgtttgtgataaatcatggagtctgttatagcagcacaacgtagactgaggtggaagtgaagtccaggaagctgggctgcacagctcctcatcctcattccatcatttccatctgtgcattttcctggtgattccctgcccctggcacattcctcactgtcatttctgctgcatcacagtcacaggcctgcaaacagaaactgagtctcttcctgtcaccccctgctcacactgctgggaaatcttgctaggaagggcttggaaacaggaataaggctgggtgtggtggctcacacctgtaatcccagcactttggtaggccaaggcaggtggatcacgaggtcaagagatcgagacaatcctagccaacatggtgaaaccccgtctctactaaaaatacaaaaattagctgggcctgctggcatgtgcctgtagtgccagctactcgggatgctgaggcaggagatgaacctgggaggagcggaggctacagtgagccgagatcgggccactgcactccagcctggtgacagagagagactccatctcaaaaacaaacaaacaaacaaagaaaaaaaaaacaggaataaagccagaggtcaggaccaacagggaccatgtaagtgctgcaactcagacattcacatagaagaccggacactattccgaagagctgtccagtgggagaaaacaatgtcaccgctatgtgtaagttgaaaggcacggccttcaataacctcaagtcacataaaccgagaaagaagcatagacgattttatgagatgaaaacatgatcacattggatgaaatattctgtaagtatctattaaatccatttcttctatagtagggattaacgttctttgtttgtattgtctggaagacctgtccaatgctgaaaatgaaacatagaaatctccagctattattgtattggggcctatctctctctttagttctaataatatttcctttatatacctgggtgctccactctttggtgcacatatatttaaaactgttatatcttcttgctgagttgatgtcttattcattatatattgactttattgtctctgcttagagtttttgtctcaaaatatattttgtccaatataaatatagctacacctgttttgtttcatttctattagcatggaacatctttttctatttctttatcttcggtatatgtgtgcctttataggtgaagtgtgtttcatgtaggcaacagatcaattgtttttgttttttcatccattcagccactctatgtgttttgattggagagtctagtccattttcattcaatgttttcattgataattaagtaaagacttagtcctgccattttggtgtttgatttctagctgtattttggtcttctcttcctttgtttcttactatctttccttactgaagataattttgtctggcgatacaatttagtttcttgctttttatggtttgtgtttttttttgtgaatccattgtatgttttctggttcaaggtgaccatgaggcttgcaaatactattttataacccattattttaacatgatagctacttaacaccctttacttaaaaaaaacaagcaacaagaaaacttatagaaactctatactttaacttcatccccccgccttttaacttttagttatttctgcctatatcttattttactgtgtatatcttcaaaagttgcagttattattattattattggttcattgtttagtctttctatttaggaaatgagtagtttacacatcacggttacagtgttataatattgtgtgtgtttccactaaaaaatctgctgccaggtgtattgcagctgcattgtatgctattttttttctttggggcttgcaggattttttctttgctcttgacctttgaaagtttgattattaagtagcttgaattagtcttctttgggttaaattgtcttggtgttctataacctgcttgtacttggatattgatctccttttccaggtttgggaagttctctgttattattcttttaaataaactttctaccactatttctttctctactttttctttaaggccagtaactcttaggtttgcctttttgaagctatttttctagatcctatagccatgtttcatggcttcattgttttttactccttcttcttttgtctcctctggctgtgtgtttcaaatagcctgtcttcaagctcactaatattttcttctgcttgatcaattctgctgttaaaagactgatgcattattcagtatgccaattgcatttttgtattttattttgctttatgttctgggatacatgtgcagaacatgcaggtttgtttcataggtaaacatgtgccattgtggtttgttgcacctatgaacctgtcacctatgtattaagctccacatgtattagctgtttgtcttgatgctctccctctctttgcccccaccaacaggccccagtgtgtattgtttccctctccgtgtctgtgtgttctaactgttcagctcccatttatgagtgagaacgtgcagtgtttggttttctgttcctatgttagtttgctgaggatgatggctttgagcttcatccatgtccctgcaaagggcacgatatcattcctttttatggctccatttctcagctccagaactattgtttgagtccttttaattattttaaacttttcggttaacttatctaataaaattctgaattccttctctgtgttatcttgaatttatttgagttttcttaacactgctaaattaaatttcctgtctgaaaggtctctgcttctccctggtgcttatttagtttatttggggagatcatgctttcctggatagtgttgacactagcagatgttcttcagtgtctgatcattgagtaattaggtatttagagtggtcttcactgtctaggcttatttgtacctgtcctttttttgaaggcataccagatattccaaacacttgaatgttttgatttaagctgtatctcctttggggtgaactaaaaaccagtaatgttgtgattcttgcagactcatacagttaccaccttgatgatcttggacaagttccaggataattctctggattacaatgcggagacttttgcccttttccctttctttctccccccaaaaaaacagtgtgtgtgtgtgtgtgtgtgtgtgtgtgtgtgtgtgtgttttgagacacctaaagctggggatagactaataaaagcaccgttgtggtcaccaccactatgactgggtcagacctgaatccagtatagcactggatctcactgaaggccttctgtatccactccctggttgcaacctaagttcactcaaggccctgggactctggaagcagcagatggcagagcaagccaggtctgtgtgcattccttcagggcggtgagttcccctaggccttgggtgggtccagaggtgccacctgaaagttggggactaaagtcaaaaaccttagaagtctgtatggtgcttttattttactgcagcagagctggcactcaaaccacaagatgcagttcttcccacactcctctttccaaaggcagtggtcaccccataaccattgccacaatgaagagtatggccagactaccacagatgtttccttaaggcccacagtctcttaagtcaactcatagtgaatgctgccaggcccaggactcattccacagggcaatgaactccgtctggcccaaagcaggtaaatagatgtcatccaagaaccaagtccctgaattaggggtcccaagagcctgcttggtgctctactcccttgtggccatgcaggtacctaaggtgcaagatgaagtcccttttgcttttttctctgcttttaccaagcagaaagagtttttcctcatagccaccacaactggtaatgtgctgtgtcccatctgaagccagcagatcttagaagctcatccaagaccctcagcatagtacctgggtattgctgataccattagcaggtgataactctcctctcctcaagtgaaaggaaggggtctcttttagagccacagactgtgcatcctggagttaagtgaggggtaaagccagcactccattagtcaccaaagctgctgtctcagtaagtcacctgaccccctcttcaccagtccattgtctctgggcccagttcaaccccatgactcacctaagaatttctggccttatggcctagactgccttttaagcttacttgaaaaaccagagtaccgtagctctcactggcaaggtttgcaggaactcaagtttcaaccgctgggatcagggattttcctctggctaagcctggcttaaatgctccctccattggtgtgtgtcagctgagtttgatccaatttgcctttcttctgtaacaggacagcaatgacttcaatacctcacaattgctgtgctctcctccctccagtaccccagtacccagagactctgtaccacattcctgctgcctggatgaaggactggcattggcaattcaagacgtttttttctatctcttcagtgatatagagttaaaaccaggtatctatgaggattcacctgcttttggtttttatgaaggtgtttttcttgtgtagatacttgttaaatttatgtccttgaggcgtgggggtaagattggtggagcactctattgtgccatgttgcaaggtctccccaatttaaattttgatgaaatccagtttatctgttttttcttttgtttcttgtgcttttggaatcatatccaagaaatcgttttaagatcctatgtcatgaaatattcttcgatgttttttctaaaaatattaaaattctaggtcttacatttattgtttgatacattttgagttaattcttgtatgtggcttatggtaaggtcccaactacatcctcatgcatgtgtatatccagtttccccaaaatcactggttgaaatgagggtcctttcccaaaagggtgtcctggcacatttattgaatctcaactgaccacctatgtgcatgtttactttttggctatcctttatatttgattgatttctaagtctgtccttaagccagcaccacattgttttgattactgtagttttaaagtggttatatttgggacacaataaaacaggcactggcaaagtcacttttaggctttacacatcttggatttgtctttgttattttttcaggagtcatataaatactattcctcatcattatgcctatatcttgagaagtaaagacacatgccctaatcagctgtgctggggaataggtcaccatgagatagaagacacttctcagtgtccaggaaacacttcttggtctctttcttcccatggcatgactcccatctcaactcacaccccccatactacactttttgttgtcaccaacacagagtcattgagtgaagcttagattctgttttcagttccctctagttcactagcctcaaaacattcaatgctgagcagaaggtgagtgcctgttgtaggctggaccaccttgcaaaaatgctgcttataaaaataatttctgtcttcctggcccgagtcagtccttcacttccatctatgtgcagcctgttttgctgctggaaccgactgactaatttataacaaatagtaatttatttggcacaattctggaggctggaatatccaggaacatactgttggcatctgtccagggcctttgttttgcatcatctcatagtagaaggaggaatgacaaggagtgagatcaagagagcaagatagggccaaacttgcttttataataaacttactctcacaataactaacccaattcagtaaaaatgacattgatctaataatgcagagcccttatgacataatcacctcttattacaccccacctcaaaacacgtggattggatattacatttttaacacatgaactttgcggcacagattcagactatagcagccacaaagggagatgaaggaaatatcacaaaaatccagaagaaacgatgtcttctcacttcctccagctataactgggcacatttgctcacacaatcatttctgtattctcttcacacacacatatgttgaacatcctctctgtgcctggtcccatgaagttgacaccccccaactccctcatcaatgtttctctccacactgaatagaaattcacattgaattttcatgagtgatagacacttagtattcactctttattccatttaacagttagcttatgttgtcaaaagatgattaacgcactttcctcttttttgagcttcccaagactcaaagatgtcttcagaacaaagtgtaaatcttttacattggcatccaggtttttctaatagaaacctagcctctaggatacttccaagaacttcttaactcattctgtgctccctaaaaataacctattaatgtggcagcaaaagcatgttgtggcatatctcttttgtttttgatactgtttgccacttttgtttaattcttacctcctctccatatagatagaacatacaagtattttaatattcagaataatttccacctcttattgaattacacccaaggttatgttgtgtctatttagggggaaataataagattttaataattattttgtgacccatatatggactactaacaaaaattgagtttttctcctatcttaaactctgtagcattaaaactcatgctagcaaaatgaataataaattttggtctgaaaatccaaagtgaattctggctgcatctgttatagagatttggagctataattcatcaaaaacgaaacaacacctctttcttactctgtcttcttggcccctcacttgcaaatagatgcaccgatgttcagcaccatgaacagtgccaccgaggtttatttttaaaaaccactttaggggacttgggcatcaaggttaaaagtgtcacagagtagatttatttttggggggtcttcagcaataactggaaagatttaaagaccttttagaaaggaaggctttagagttcagaaatgactttttgttttttgagcaaagccctatttgctgggagaacatcaggaattttgattgaggaggggagagaaagttttggagtgggtcaccagagccaattcaaataccgtttgttgaacactggttcctgaactctatgttgtctctttgtatctgaggcatgattcctgcccactatgagcacagagtagtatctgagataaagatgagcgtaaccaatggacaaagcactcaactgagctgatgaatatcattcaagaaagggcagtcaccgtgtgcttgtatagaaaagccaacacgtaggactgtgtaggttattcaaatgcaatagccaccagccaaggggcaagtcgatatgaaatcaaaggcattttctgctcagcaagccatgggtcccaggataattttaatctactcagagcaagaattgcttaattccagaagaaattaattccatgctagtgaaggggcctatgatccattatcaaaatataaaagttacctagactgagaaagggaaggtgtacaaagaagagtgtacctattgaaaacccaagagattccagtgagagaggagggaattttattccatacaggaatggaatgagggagaaaggtgtgcagagcatgattagctgtgcattggcacctcaaggtatctggatgttaggttaaagatgagtaaggagagaatcatacccatgagtagggttgaagttgaaagagctattgcaatgaacatggggagagaggatgtggaggatcaaaatgatgcctgagatgagcccggtggaagagaggccatttggtggaaccctcaccaatttgaattcactagtttttaggcaatacgttgtttctcctaagtggttctccagatgttcagtgaagcagataatcatagctcttgtagagggaataggactgtgattctgccatcttggtgggaattctgagaagttgagaatggagggtggagccaattgctgcagacaaacattcccagaagaaaagaatttaggcatctggctggtttcagcaatgacataaaccagtgactactgtctattttctgttgacactataaaataaatatgttcattgcatttttcctatgttcgtttcagtattgtgtgtttgatttgtatagggcagataatttattcctttagtgaacatgttgtgagaaagtgcacctgataatttgtactcacctcaggaacaccaggtcctgagttagataataaaacaataaacttcactctgagtctgttcctctattgcattggtttctgggattatttagaaggtaagtgttttggggatgtgggaagtgtatgagccagtgggggctaagtggaactcattttcaaaaatgtcccatgataatgacaagtcaaaataaccacagcttgtgtagttccctccccttagtttgggctttctgtgtgacagtttgatcaatataatgccatagaagtcacactgtctgcctttcaaagctaaggcctatgatgcctcgcaccttcttcatgagacttttggaaggcttttttttggtggaagccaatcattgatcatgagttgaggaaattcaaggcactaatgtggagatgagttaggaaaggaaataaacaaccagcccccaggtgttcagccacactagtgttgagttggacatgagtgaagcatcttctgaaatctctgactgtagatctttctgaaatcgagacacccaccacataatctgtcacctacctgagtccactaaacctacaaagctgggagaaatcagaataaatgatctaagccaacaggtgttgggaggttgcctgtgccgcaataccaacagtaacagcagcaaagcagaatctgtttactgtgttcatgtgcatgaattgtgtccattccaccaataaaccacttattttgtgatataaaacaatgaccatttgtttacaaagagaaatctcaggattctgcccacataaaatggaaaaatctgaaaattctttcgggaaaaaaaggattctttaaagggaatcattgaacggtgattctatcgcttggattgaaaacttcagatgtaaacatttcaactttttctttcagtgtcttcagtgcatctcacacaaatctaggcagtttcaagacacaagaaacactcttaggatgagtgaagaattaagatatttcacctagctttcctcaaattacaaagtctctccccaaagccaattatgcctgtatgtttgtaaacaggtacctaacatttcactgcaatcagtcatctaaaatgaaagaattttggttcagagtgtgtgacgtaaagtacgggctgtagaggatgttgtttgttttgtcatctcagacattccagtggtcttgtgactcactgcctgtttcacttgtgtccttgtgccactttgtctttttccccattaaagtaagaaccagatcctggataatttagtgaagttttaatgaccaagtgtagaggaaggtgtgaggagagatcgttctgttagcaggctctgggataccacagtcatggagaaatggggagtttctgttgctccttaacagcagggagtgtggacatcaccctaaatcacagacacacagtgaggtcaggaagacatcccaccacacttgcaccatcttcacgtaacatagtgggagttgataggcaaagctgtaacactgtttgccatttaccattacctgcaagaggaaaaatgcatcagaaatacagcatgccacaaaacaagctatcagccatagtgcctatagtaaccaaccagaaaactcccaattatacatcagaaaccagtagacatacttctatctacagactacctttgtgcctatttcagacattcattcattttatttccaatgtttcctctcattagtccggaagttccgccactctgtgtcacacagttcctgtttcctcagcctcttctctagcctggaatatgccatactctgtgtcatgaacttgaatccttgcatcttctacaggggttcacacagggttagtgatcaacaatgttcattgaatgtatagttttcagttatacagactgtgactgccattcaccactgatggcctactttctctttggagttgcccagggctgccaagcaggtagcaaggaatgaaatccaagtgtttttagagaaaaagaacagaataggtattgcaaaacataatatattattttgaacaactgataggcatatgaaatctgaacaaaatgttaacctttggctttacccatttgaaaagatcaggaaggttggaaatattatttattactaaagctataaaacagtcaattttcagatgttaatttataatatttaaaatgcatacaattttgagccagttatttcatttctttgtaattattctttaatacaactactgggaatttgatttaaaaaagttgattagaaagcttaatacagcatcatttgtgagagcaaaatactggaaacagcctaaatgtccatcaaaagagtcaaattcaataatttttgataaccattctacaggaatattatgcagtgtttaaaaactgaggcagcaccatgaatagatgactttgcaaaatacagtgtttgacaaccagtccagtccaattcctaaagtacatttgttcagaaagaaaagaaaacatagatctgtatatttctgtaaacagattatctccataatttgagtagagaagccagtaatattattgtactggggaataaaattggggctcaatactgagggaaagactaaattttgggctcactgaaactattttatttacatgcagattttctccattttggataaatgaaaatatataagtaacatcatcactagaaatgagcactatgggaaaaaacagaggagattcttcacgttgggggaaatgacaggtgagatgaccttgatcctggtcaaatttgggaaaatagctgaagatggcagtgcaagcagagggtgctctgtgatgaaaagtctggagcaggagcagttatgggagatgggccccaagggactcttggggccagcttacagagagctgcctcctgctctgggagccgagagaggtcaaacactgaaagcccctgggatactcacctggtactcattgtccagctctgagatgtgcaggtcaaattgtttgccatccttaaagggcataccttcagattttccttaatgcttccaggctccacacacatgctgttcatgaccacccaattgccaaagtacactccaaagtggaaggcaatgtctgacttcttatctatcccggtgtggaaatcaacctgcagctgtgggtccttgctgaggtcaaagcacacagcatgttggacaggtcccttctgtatagggcacacacaggacacacacacaaatctcttcccacctttcccaggacagacagaagccttcccggtgacactgcaggcctcatccctgcaggactgcttcagcttcttgttccctcatgcagggatatgctctgcccctcatccccagatggaaactgagccacagtcactgacctgaggctatgagttgtctattctctgagaactctatactccttgatagaagtgtcagtggcagatagagatcctcttggaaactttggcaggtccctataggtgagtcatagcacagatccggaaaatgtggagcaaagacatgccatcctttgtggataacctctctccatttgagaaaaagcatttgccttgctactgggccttaatagagagtgaatacttaaccatggcctccaattttctgtgaatcctggcttctgtcaagaatcaggtatgacccaccatatttgttccagcaaaagacacgatctcattatttttatagctgcatagtattccatggtgtatatgtaccacatttttctttctccagtctaccgctgatggtcatttatattgataccatgtctttgctattgtgaatcatacatgtgcaacaaacatacacgtgcatgtgtctttatggtggaacaatttatattcctttgggtgtatatacctagtaacgggattgctaggtcaattggtagttctgtttttaggtctttgaggaattgtcacactgtgttccacaatgattgaactaatttacactcccaccatagtgaatacgcattcctttttctctgcaacattgccagcatctattactttttgatattttaataatagccattctgactgatatgtgatggtatctcactgctgttttgatttgcattccctaataatcagaaatgttgagcttttccacatacgcttgttggccacatgtgtatcttcttttgggaagtgtctgttcatatctcttgcccactttttaatgaaattgtttgtttttttcttgtatattccttaagttccttatagatgctgaatgttagccttttgtctgatgtgtagtttgcaaaaatgttctcccattctgtaggttgcctgtttaccctgttgatagttttcctttgctgtgcagaagctctttagtttaattagatcccattcgtcagtttttgcttttggtgcaatagcttgcaccatctgcatcatgagttctttccccattcctatatccagaatggcattgcctaggttgtcttctagggttttatagttttgggtaatacgtttcagtttcagtctctgatccatcttaagttgatttttgtgaatggtgtaaggaaggggtccagtttcaatcttctgcatatgctagacagttattgcagaaccattcattgaatagggagtcgtttccccattacctgtttttgtcagctttgtggaagatcagatggttccaggtttgtggccttctttgtggtctctctgttccatatgtgtttgtttttctacaaatactatgctgttttggttaccgtagcctcatagtatagtttgaagttgaatagcacgatgtctccagtttttttctttttgcttagggattgccttgatcatttgggctttttgtttgttccagatgaatttttaaatagttttacctagctgtttgaataatgtcattggtaattttacaggaatcactttggatctacaaattgctttgggaattatggtcctttaaatgatatttgttcttcctaaccatgagcatggagtgtttttttgtttgtttcatctcagatttctttgagcagtgttttctttttctgaatttttgccttgaagaatctggcaaattgtattttacaaaggtggtcatgatgatatctcttatcctatacgcttttctccagtgtgattttttatatatattttttatttccatgggtttttggggaacaggtggtatgtggttccctgagtaactctcttaatggagatttgtgagatttggggtcacccatcacccgaggagtacacactgaacccaatttgtagccttttatctcttatccccttccctcccttttccccccaagtccccagagcctattgtatcatttttatgcctttgcatcctcatcgcttagctcccacttatgagtgagaacatatgatgtttcattttgaattaatgagttacttcacttagaataatggtctccaatcccatccgggttgctgttaacaccattaactcattcctttttatggctgagtagtatttcattatatgatggttatttgcactggtttcacatatttgcaattgtgaattatgctactataaacatgtgggtgcaagtatcatttttgttaatgacttcttttcctccaagtagacaccaagtagtgagattgctggatcaaatggtagttctacttttagctctttaaggcatcccacactgttttctatagtggttgtactagtttacattcccaccagcagagtaaaagtgttccctttcacctcatcccgtctaatgtctattattttttgatttttgattacggccattcttgcaggagtaaagcagtagcacattgtgcttttgatttacatttctctgatcattagtgatgttgagcattttttcatatgtttgttgcttatttgtatatcttcttttgagaattgttttttcatgtccttagccccctttttgatgggattgtttgtttttttacttgctagtttgtctaaattagttgtagattcttgatattcgtcctctgttagatgtacagattgtgaatattttctcccactctgtgggttgtctgtttactctgctgactgtttcttttaccatacaaaaactccttagtttaattaagtacaacctagttatctgtgtttttattgcattggtttttgggttcttggtcataaaatctttccttaagccaatgtctagaagggtttttctgatgttatcttccagaatttttatagtttcaggtcttagatttaagttcttaatccatcttcagttgatttttgtataaggtgagagatgaggatccagtttcattctcttacgtgtggcttgccaattatcccagcaccatttgttaaatatccacttatgcttattctccactttatgctttcatttcctttgtcaaagatcagttggttgcaaatacttgggtttatttttgggttttctattctgttccattggtctatatgcctatttttataccagtaccatgctgttttgatgactatggccttatagtatagtttataatcaggtaatgtgatgcctccagatttattctttttgcttagtcttgctttggctatgcagattcttttttggttccaaataaattttagaattcttttttctagttctgtgaataatgatggtgggtattttgatgggaattgcattgaatttatagattgcttttggcagtatggtcattttcacaatattgattctactcatccatgaacatgaaatgtttttcctttttttgtgtcatctctgatttctttgagcactgttttgtaattatcatcgtacagatatttcacctccctagatggctgtatttctaggtattctattctttttgtggcaatcatgaatgtgattgtgttacttatttggctctcatcttagctgttgtaagaaagaatgatagagatttttgtatgttgattttgtatcctggatttctctaaagttgtttatcagcttaagggccttttcagctgagactatggggttttctagatacagaatcatgttgtctgcaaacaagaatcatttgacttcttttcttcctctttggatgcccttttttcttactcttgtctattgctctggccaggaccttcgctaatatgttaaataaaagtggtgagagagagcatctttgtcttgtgccagtttagaggggaatgctttgagcttttgcccattcactctgatgctagctgtaggtttgtcatagatgactcttattattttgaggtatgttccttcaatactcagttgattgaggtttttaacatgaaaaggtgtcgaattctactgaaagccttttttgcatctattgagataatcatgtgatttctgtcttttgctgtgtttatgtgatgaatcaaatttattgattggcatatgttgaaccaaccttgcatgccaggggtatagcctacttgatcatggtgggtaagcttttttcatgtgctgctggattcagtttgccagtattttgttgaggatatttttattgatcttcatcaaggatatttgcctgaaatttgttgttgttgttgtgtctctgccaggttttgatatcaagataatgctggcctcacaaaatgagttaggcaggtatctctcctcctcaatttgttggaatacttccagtaggaatgataccagctcttccttgtatacctggtagaattcagctgtgaatccatctggccctgggccttttttgggtggtaggcttcttattactgattcagttttggagctcattgttggtctcttcagggattcaatttcttcctggttcagtattggtcaggtgtatgtatctgggaatgtatccattttctgtagattttttagtttgtgtgcatagaactgtttataatctacctgatggttgtttatatttttgtagtgtctgtggtaatatcccctttgtcgtttccaattgtgtttatttgaatcttctctcttttcttgtttattagtctggcatgcagtttattttgtcacttttttcaaaaaaatgaactcctggaatcattgaatttttgactggttttttgtgtcttgatctcctttggtttagttctgattttttatatttcttgtcttctaaatttgaggttgacatgctcttggttctctacttcttttttaatttcaaaattaattttttcaaaatcgtcacatggtaggcattctctagttcttttaggtgtgatgttatgttgctaagttgagatccgtgtaactttttcatgtcagcatctagtgctataaataatccttttaatactgccttagctgtgtcccagagattttgtatgttgtattatttttctcactagtttcattgttctcatcagtttcaaaaaacttctcagtttctgacttaatttcattatttacccaaaagtcatctagtagcagggctattccatttccatgtcattgtatggttttgagtgatttccttagtcttgatttctaattttattgagctgtaatctgaaagaaggattgctatcatttctattcttttctatttgttgaggagtattttatgtctgattatgtggtgagttttagagtatattccatgtggttttgagaaaaatatatattctgttgttttttgggtgaaaagtcctggagaagtctatcgggtccatggatcaagtgctgagtctaagttctgaatgtcttcgttaattctctacctcaatggtctttctaatactgtaagtggggtgttggagtccctcactattactgtgaattctattattcaaagtctcttggaaggtctctaagaacttgctttatgaatctgggtgcttttgtgctgagtgcatatatatttaggatagtcagatgttcatttgaataaaactctttaccatttggaaagcccttagacaacctttcaaagtgacttggagccccagagcactgtaggatttgctggaattcaagttccagccaatgggataaaagattccccttggctaaggctggtttaagtgctccctcagttggcatgcaagactggagttgcaacactttttcttatcacttcaatgcctctttcagcaatacagagttaaaaacaggtactacgagggcctacctgattcttggttctcatggaggtgctttttctatacggatgttacaagatagagtgtcctaaatgtgagttgtccaagttcttggcatattggaaaaataaattgaacaaaatgccacagagtgggcacagatttattgaagacaatttacacagtggaagcagactccacttgagcaagcagctgcttaagagccccatcaagggccagacaaggtggctcacacctgtaatctcagcactttgggaaaccgagaagagcagatcatgtgagtccagaagtttgagaccagcctaggaaacgtggtgaaacccagtctactaaaaatacaaaaattagccagccatagtagcacatgcctgtaatccccgctactcaggagactgaggcatgagaattgcttgaacccagcaggcaggggttgcaatgagtcaagattgcaccactacactcctgcctgggtgaaagagtgggactctgactcaaaacacacacacacacacacacacacacacacacacacacacacacacacagagccttctttgtttttttttccagtatctgaaaacagctttatggtatatttatctctgtgtatttatttatttatttttaattattattatcctttaaattctggaatacacgtgcagaacgtgcaggtttgttacacaggtacacatgtgccatggtggtttgctgcactcgtcaacccatcatctacatcagatatttctccgaaagctatctctccccttgttcttcaacccccaaaaggccccagtttgtgatgttcccctccctatgtgcatgtgttcccattgttcaactcccacttatgagagagaacatgcggtgttaggttttctgttcctgtgttagtttgctgagaatgattgtttccagcttcatccatgtccctgcagaggacattaactcatccttttctatggctgcatagtattctttggtgtatatgtgccacattttctttatccagtctatcatttgggttggctccaagtctttgatattgtgaacagtgctgcaataaacatacgtgtgtatgtttctttatagtagaatgatttataattctttgggtacatacagtaatgagattgctgggtcaaatgttatttctggttctagatccttgaggaactgccacactgtctcccacaatgattgaacaaacttacactcccaccaagagtgtaaaagcattccaatctccacatcctatccagcatctattgtttcctgactttttagtgaccaccattccaactggagtgagatggtatctcatcgtgattttgatttgcatttctctaatgaccagtgatgatgagcttttcttcatatgtttgttgggcacataaatatcttcttttgagaggtgtctgtttatatccttcacccactttttaatgggattgtttgggtttttttgtgtaaatttgtttaagtttcttgtagattcttgatattagccctttgtcagatggatacattgcaaaaatttgcccccattgtataggttgcctgttcactctgatgattgtttcttttgctgtgcagaagctctttagttttattagatcccatttgtaattttgggttttgttgccattgcttttggtgttttagtcatgaagtctttgccgatgcctgtgtcctgagggtattacctaggttttcttccagggtttttttttttgggatttaggtcttacatttaagtctttaatccatcttgagttaatttccatataaggagtaagaaaggggtctagtttcatttttctgcatatggctagccagttttcccatcgccatttattaaatgtgcgcatggcacatgtatacatatgtaactaacctgcacaatgtgcacatgtaccctaaaacttaaagtataataataataaaaataataatcataaaaaatatgtaatcctttccccattgcttgtttttgtcagatttctcaaaaatctgatggttgtagatgtgtggtgttatttctgaggtctctcttttgttccattggtctatacatctgttttggtaccagtaccatgacatttggtttctgtagccttatagtatagtttgaagtcaggtagcatgatgactccagctttcttgtttttgcttaggattgtcttggctatagtgaagaaagtcaattgtagcttgatggggatagcattgaatctataaattagtttgggcagtatggccattttcatgatacttgttattcctatccatgaacatggaaagtttttccatttgtttttatcctctcttatttccttgagaagtggtttgtagttctccttgaagagatctttcatatcccttgtaagttctattcctaagtactttattcactttgtagcaattctgaatgggagttcagtcatgatttggctctctgtctatcattggagtatagaaatgcttgtgatttttgcacattgattttgtatcctgagactttgctagagatgcttatcagcttaagcagattttgggctgagacaatggggttttctaaatataccatcatgacatctgcaaacagggaaaatttgacttcctcttttcctatttgaatatactttatttctttctcttgcctgattgccctgtccagaatttccaatactatgttgaataggaggggtgagagagggcatccttgtcttgtgccagtttccaagggaacacttccagcttttgcccattcagtgtgatattgcctgtgggtttgtcataaatagctcttattattttgaggtacgttccatcgatacctagtttattgagaatttttagcatgaaggggtgttgaattttatcagaggccttttctgcatctattgagataatcacgtagtttttgtcattggttctgtttatgtgatggattacatttattgatttgtgtgtgttgaagcagccatgcatcccagggatgaagccgactgatcgtggtggataagctttttgatgtgtttctggattcagtttgccagtattttattgaggattttcatatcgatgttcataagggatattggcctgaaatttcctttttttgttgtgtctctggccaggttttggtatcaggatgatgctggcctcataaaatgagttagggaggagtccctctttttctatcgtttggaatagtttcagaacaatggtaccagctcctctttgtacctctggtacaactcagctgtgaatctgcctggtcctgggctttttttggttggtaggctattaattattgcctcaatttctgtgcttgttatttgtctattcacggattcgacttcttcctggtttagtcttgggagagtgtatgtgtttatgaatgtatccatttcttccagattttctagtatacttgtgtagaggtgtttatagtattctctgatagtaatttgtattactgtgggatgagtggtgatatcctctttatcattttttattgtgtctatttgattcttctctctcttcttctttattactctggctagcagtctattttgttaatcttttcaaaaaaccagcttctggattcattgattttttgaagggttttttatgtctctatctttttgagttttgctctgatcttagttatttcttgccttgttctagcatgtgaatttgctcttgcttttttagttattttaattgtgatgttagggtgtcaattttagatattttccacctttttgtgggcagttagtgctataaatttgcctctaaacactgctttagctgtgtctcagagattctggtacattgtgtctttgttctctttgatttcaaagaacttacttatctctgccttagtttcatcatttacccagtagtcatatacctttacattttaaaatacccagacaactgtcattggattgtgtgcaacagaaaagataaatgcttgagtagacggatgtcctactctctgtgatgtgattatttgcatccctatatgatattttatgtaccagattaatgtatacacctactatggacccacaaaaattaaaaacaaatgacagacaaaagactaatatacacatgaaaacatatgccacgtcacgggtcattagggaaatggaagtcaaaaccaccatgagataccacttcacactcattaggatggctattacattaaaaaaatgaaaactaacaagtgtgaggatgtgaataaactggaacccttgaacattgctgtttggaatgtaggatggtgtggctgctgtggaatatattatgcagttcctcaaaaacgttactcatcataatatacatctctttggcaactgggatcaattttttctataaattcaataatgtcaattcactgacaataaaactgaagagaaaagtgaagtaagagggagaagaaagcaaaggaggaagggaattctaattcactccatctttaaattctaatacaggtattaaggatgcttcccttcatcacgaaaagagaacttgaggaggggtcctgagtctcccaccccaggtgaagaagacttcattatgactgaagtccaatcacctgtacctgcacatgtcctcacacagtctggaactaaggagcacacaaatcaagaactagacttaagaatctcaactttctccctgaatctgcaggagaaagagtgtctctgaaaatttttattcctatggacactcaatgaaaagaaaagggtgcagctagagcccaggtgtgtgagatgcagatgggaacagccctcacctggcagagccaaggggaccagtgtgggatcggggaacacaagggctttctctaccttcctccataggtcctgcttaggatcaagaccagtgttcccccagaacctctatagggaaagggaaaggttatctttcactaccaatgatttctacaagaatcttcactatttttaccattgtacaaattaagaaaatgtacaccttcttgggaaattatgcacagtgaagagaaggcttaatgagaggcatggatgctggacttcacaatccctcatcttcactccatcatccttatctgtgcatttccctggtgaccccttcctcccccggtacctctatcactgtcatttctgctgcatcacagacacaggcttgcaaacaagtgtgattgtgactgagtctgtttctgacaccttaccccttctcaccctgtgggaatccttgctgagagtgtcttggaatcaggaatgaagccgcatggcagggctgacagggaccatttaaatgctgcaagtccaagacattcacactgaagcctagacacaattcagaagagccaacctaagggagcaaatatgtcacccctacctgtgagttgaaaaggcacacccttcaataacctcaagtcacataaaggaaggtggaatagagactttatgagatgaaaatgtgagagtttgtattgtgagtgctttactagagttgtgtgtgtgcggaagacagagaccctggggctatggtgtctgagatgtttgtggggtgttgagtgtggaccctggaccagtgtaaccttttgtgagggtgcaatggcatctgatgagagtgaactctgctgagatgatgtgactttaggtgggaggtggagaggccaccagcatgggtgaaacgtgcctgagtgtaagagggtgactgtgttttgtcttcctgtctgtgatgtgtgtatgagcacagccagaccaatgcatgagcacctttacatgcacagtgagtaggcatgtgtgactcagtgagtggcgtggctctgtgtgactgtgggtgtgtgtgctgggatatgacttggtgttgaactgggaacatacatgtggctttctgtccatgtgaaggttcctcctcacacagcagggcctctgatgaagcagctgtgcatcttcccatgtgtgtcaatgtggatgccgggtggcagaactggtggggatcttggggactgggagttaccaatgactcgtttgtgagcattaatgagagcagaatgtatgatctgtagaggtctcttcccaggcagagtggaaaagaggaatccagactatgggaacgatggttccttaggtggggtctgcacacagtgaccatcatctcctccctgtcatcctcaggtctcttcctgtcccccacccaagcctgcccttcccattctagttcaggagggtatgcaaatcctgactctctgaggaataacattagagactgtggtttcagagactgaatcaccccaaaccgggaaggaacaagtgtagcctcagttcagatagagcttactgtggatattaatcatcaaagtagcagggtttgctggctcatgcctataatcccatcactttggtaggcaaagataggaaaataacttgaggccaggagtttgagagcagcctgggcaaaatagtgagacattgcctttacaaaaactttaagtaacagacaagcatagtggcgagcatctttcattacggctactcagaggccaaggtgtgagaatcccagcagcacagaagttcgagactttagtgagctatggatgcaccactgcacatcagcgtgggtgacagaggaagatcatgtctcaaaaagaaagacaaaatatccacttgtgggttctctctatctacttccttaacccacactcttcatttgtctaagtgctggggctgtgctttcaacaacttttacaacttctgggaacgaagtccgtggcccttgatgactgtgatgcatgttcatcccacacacaggggtttcctgttcttttgttatttccctctctcgttcaacaagtgttgcttcttactggaatggatttctctactgttacatcctcaggtcttgttttcacagatattaatttctctaagatcaccctacaaagtaagaatttctaataaagacaaaaaagtaaaaagtgtagaaagtagaggaaagaaagagtttaaataatcttccttgtacatgggaaattaaattaggcagcgatcaagtaatggatctatgattgcactgccagtaagaggcacaatcaggactggagtccaggaagcctggcttctgaatccttgctcctcatgtctttaggaatatggagttctgactgcgatagggtgaaagaggtaagtcctcacagtttgcctgttgatctctaaccttctgcatcatgggaatgtgtcacaaagctggaggccgcacctggcctggcccctctcacccactctcaatctcctagcaagtgccacacacaaggcctgtgtccttgtccattggttcttgcatgacaatcagagggacatcgatcatccctttcaagtgagtactccatggtccatggcacaggggtggaaaagaaaggagaatatttactcaggacgtggtctcatgtgggtaatgtggaaatgtgtagttggcaggatggaggtagcatgccactgtagatcctggggaccctccagcaccaggcatgaaacctgcagtggctaaactctgggctagtcatggggcctaggggaagaggacactcaaaggttggggctgtggctctttatcaaggggcatggaattttcagagaatgaacataggcccaggtaagtgactgtggctcactttccatcttttgatgaggggcagagcacgtccccacgtgggggaaatatgaggagctaaaacagccccacagggacgaggcctgtagtatgacaagggagccttcgttctgtactggggaaagaaaggaagggatttgtgtgtgtgtgttgattgtgtgccccacaagggaggggcctgcccaacacttcgtatgctttgccctcagcaatcattcagcgctgcagatggaattctacactgggacaaatgaggtctcagacattcccttccatttctgagtgcactttggccattgtttggtcattgacagccgtgtgtggcctggacgtatgagaggagctgcaacaatgggttctttgagaatggcaaaccatttgatctgagcatcttggtgctggacaatgaatacaaggtgaatgcccaaggagctcccaatacctggccttcttgggctctgagagcagaaggcagctctccctggcctggccccagtagttgttcaggacccatctctcataactactcctgccccgggcacagcaccctctgcttgcactgcctttctcagctcttttccaaaatctgactaggatcaaggtcatcacacctaggatttcccccaaagtgtagaatctcctcagtcttttcccattgtgctcacttctacttatgcagttatttaaattttcacttagctgaatgaatacaatatccataagaataaaattgttttagtcaacgaaaaattaagtccttctttcactcctggacccaatcttattcctgggagcattaccagtgctctgctctccttccacagcaaatctttgcttatggaaacatatagatctataatttcacttgtttttaagaaaatcccagtatacattgctctacacattacaccttaaaaactgatttgatttgttgtcaaagaatataccttgaggatcccgtctactaatggtgcttcctcagtttttaaagattgcataatattgcattagaaggattacccaaaattactgaacttgactgttttgatgggacttgaggttatttccaatattttgctctcacaaatggtgctgtattaagacttctagtaatttattttgtcattatccacctcccttacttatactgaaagataattacaaagaaaaaaataactggttcaaaaatgtgtgtattttaaatttaacaaattgacacctagaaggttactttatagcctcagtaataaagaatatgtcccaatgttctggccctttctaatggataggccaaaagattcacattttattcagattcaagtgagggatctctttctatgcttagaagctgttcaaaatgatagtctatgttttgcaacacttgtccaattgggcctctccaacaacacttgagttttattcttggccaccatcagcccgaatctaggcaactccaaagggaaagtaggccatcagcagtgaatggcagtcatagttcacggaaatgaaagatatacattcaatgaacatggtctagcgttaaccctgtgtgaacccctctgcaagatgcaggattcaagttcatgaaacagtcactagccatggggattttccaagctagaggggaggctgagcaagcacggaccatgtgacacagagtggtagagccttgctggaagaatgatatgaaacattagaaagaaagtaagcaactctctaaaataagcacaaatgttaacatgtaaatagaagtgtgtgtcttgggttcagttatatagctagtagttttctcaggggatgttgtaggtagtaggacagagtggagaggaggctgaaagcttgtttggtggcatactgtctttctgatgcattttccctcttttaggtaataataaatggccaacactgttacatctttgcccatctacttcaaccatattctgtgaagataatgcaagtgtggagagatgtctccctgacctcaatgtctgtctgcaattgagggagatgaccacatccctcactgttgaggaatgctgcttttttaaattatattttaagttttagggaacatgtgcacaacatgcaggtttgttatatgtgtacacatgtgccatgttggtgtgctgcacccattaactcatcatttaacattagatatatctcctaatgctatccctccccactccccccaccccacaacatgccctggtgtgtgatgttccccttcctgtgtccatgtgttctcattgttcaattcccacctatgagtgagaacatgcagtgtttggttttttgtccttgtgatagtttgctgagaatgatggtttccagcttcatccatgtccctacaaaggacatgaattcatcagtttttatggctgcatagtattccatgctgtatatgtgccacattttcttaatccagtctatcattgttggacatttggcttggttccaagtctttgctattgtgaatagtgcctcaataaacatacgtgtgcatgtgtctttatagcagcatgatttataatcctttgggtatatacccagtaatgggatggttgggtcaaatggtatttctagttctagatccctgaggaatcgccacactgacttccacaatggttgaactagtttacagtcccaccaacagtgtaaaagtgttcctatttctccacatcctctccaggagacctgttgtctcctggctttttaatgattgccattctaactggtataagatggtatctcattgtggttttgatttgcatttctctggtggccagtgatgatgataattttttcacgtgtcttttggctgcataaatatcttcttttgagaagcgtctgttcatatccttcgccatggaatccctctttctatgtgaccacagaatccccagagcctactgacagcatggtctctcctcaccctttcccctgcacttggtcattaaaacatcaccacacttcccaggatttggttcttgctttaatggggaaagaggaagtcatcatcctcaagaaggcccaaggaactttatgggaggcatccagaaaccaaagtggataaaccttcttgtgactccgggagtgacaaggtccttagaatgtcttagaagtcattatgtacggcatctttctacagcacattgttgacatcagagactctgagacaaataccttacccaatcttagatgactcactgcactgaaatgttaggtagctgtttaaagcctcacaggtgtacctcgaggctttggggagaaattttgtaacttgaggacaatctggtggaattttctaattatttccattgttctcaggatatttattgtgtaatcacggtgcctggctttgtacaggctaccatgcagaaactttagaaacagacacacttcccacatgaaaacttcaatccaagcaatagttagagaatcacaagagtcccaagatttcccttaaagaaccccaattgttgatgtttaaaaataatagcgagatttttctgatgtaagtggcagaatccttgaatttctatttaaaaataaatggttatggttttagatcagaaaatatgtagtttattgttgggatgaacacaattcatacatatggacacagtgagcagaccttgctttgttgctgtttcactaggcattgcagcacagcaaacctcccaacacatgttggcttagagcaatcttttcttctgatcttgctcagttaactggactcatgtgggtggtagatcatgtagtgaaagtgacgttttctgaaggatatttcaggctgtgattccagaggatgcttcactcatgtctgactcaacactagggctgggcgaacacctggggctggctggttatttcctttcctacctcacctccaaattcatgccttgaattccctcaaatcatgagagtctcctgtttcttggactgaatgatgataggcttccaccaaagcaagcctcccaaaaggctcaggaagaaggtgcaaggtatcataggacctagctttgaaaggcagacagtgtcacttctatgacattatattgatcaaagtgagccatacacacagcccaaatcaaaggaagggaacttcataagctgtggttattgtgacatgtggtcatgaaggagcatccttggcaattatttccactcggtcctcactggcttacaagcttctcatatatcaaggataccaatcctgtaaggaaccactgaaggcaacatgtttacaggaacaggctcagattgaagtctagtattttatcatccaatcaggatctggtgtccatgaggtgactacaaattatcaggtgcactttcaacatatgcactaaagaaatatattatctgccctataaaattaaacatacaagactaaaacagatataggaaaatgcagtgaacacacttattttagaggggcaaaagataataaacaacaaaactgaaagcaaggtgggtcaccaatagctctactggagccacccacaaaaattcagccagggttctcactcttattgcatctgctcaaaccagcatgacctattccgaaaatgttgtcttgatatgtgccgcttctgtttccataagtgcttaaaggatatagatttcattaggttagactaagtgatcttccttcaatttataagcaagacatccactcagtgaaagaaaccatgctagctctttgtacatgaaaaaaaaaattaaaacaaagaaaccaattcaaaaaaaaaaaaagacaaaaaaggcagccatcactggtccatatcattgctgaaaccaacaagacccccatttgcatcttctctgaaaatgtttctctgccacagttgtctccaccttctactgtcagtgtcttagagctcccacaaagatggcacaatgaaaacccttttcctgctacaagagctgttgtcacctatttcatgacacaaatagagaaccatttaggagaagataaacaacatattacctaaaagccaaacaatgcagattgaagagggtctcaacaaatagcctctttgtctgcagggcccatctaaggcatcattttgatcatcctcattctccgttctcatgttccttgccacagtttgttcaactccaaccttactcatgggtatgcctcccgttttgccctcctttaacctaacatccagatacctttaggtgtcaatgcacagtaaataacactctcatgcctctctttcttgtttctttcctgtatgaactgaaattcccttcattctcactggggagtctcaggttcttgttagacacattctcctccttatatcttccctctcacagttttgttcacttctctgttttgatgatggatcacaggccccctcatcagcatggaaatcattttttggggaattagacaattcttgctctcagtggataaagacaatcttggaacccatgactttctgatcagaacacgagtttgatttcatatctacatgcccctggttgatgcccattgtatttgaatagcttacagggtcctacatgctgtccctgccaggcaaacacacagtgactgccttttcttgactgatattcaccagctcagttcagttcatataagccttttgttacacttatctttataccagctgctgccctgtgctcttggtggccaagagagatgtctgagatgaaaagagaaggcatagagtccaggaatcaatgttcaacaaacgatttttgatttgcctctggggacctactcaacatatttttcatacagataaaccggaattcatggtcttctcccagcaaacacagcattgctcagaacacagcatttctggactctaaagccttgccttctgaaaggtctgtagggcttttcagtttttgatgaaagcccccaaagaataaatctactctgctaatgttgtccttgatgcccaagtcccctaaagctgtttcctctaaggtgctgtccgtggtactgggcactggtgcttctgggcctgtatttgcaagtgaggggccaataagacagaattaacataaattttttgttttgttttgtatttgataaatcacagctcaaaatatgtataatgaatggagcaggaattgaatttggatcttcagaccccaatttctgcagtgccctctctcacccctcctattcaacatagttttggaagtcctggccagagcaatcaggcaagagaaagaaagaaagggcatccaaacaggaagagaggtcaaaccatccttgtttgtagacatgatttcctatctagaaaacctcatagtctccacccaaatgatcctcaagctggtaaacaactttagcaaactttcaggatacaaaaccaatgtgcaaaaatcactagaactcctatatgccaacaacacgtaagcatatggccaaatcagaagttcaattccattcacaattgccataaaaaataaaatacctaggaataataaactacaacctgaaagtaaaatgggtcaccaatagctctactggagccacccacaaaaatttagccagggttctcactcttgttacatctgcttaaaccagcatgaccttatccaaaaatattgactcgatgtgtgccacttctgtttccataagtacttaaaggatataggtttcattaggttaggctaagtgatctgccttcaatttataagcaagacatccactcaatgaaagaaacagtcaatgaaagaaatccactcaatgagagaaagctaaccagtgggtgaaagatcgttacaaggataatttcaaaacactgcctaaaaaaacatagatgacccaaaccaatggaaaaacactccatgctcatgaatagcaagaatcattatcattaaaacagccatgctgcccaaagaaatatacatattcaatgctattcctattgaactaccaatgacatttctcacagaattagaaaaaaaaaaactattttaaaatgcacatggaaccaagaatgagttgattaaaaaagacaattctaaacaaaaagaacaaagctagaagcatcactttacccaacttaaaagtatactacagggccacagtaactgaacagtatggtactggtacaaaaacagacacatagacaagtgggacagaatagagagcccagaaataaggtcacacacctacaaccatctgatctttaacaaagctgaccaaacaagcactggaaaatgaactttctcttcaagaaatggttttgggataactggtagccatatgcagatgattgaaactgaatcccttccttgcattatgtagaaaaaatcaattcaagaggggttttaagacttaaatgtaaaacccaaaactataaaaaccctggaagtctacctaggcaatatcattctaaatgtaggaatggggaaaagtttcataacaaagatgccaaaagcaatcacaagaaaagcaaaaattgacaaatggatctatttaaactaaagagcttctgcacagcaacggaaactatcaacagagtcaacagacaacctacagaattggagaaaatatttgcaaattatgtatctgaaaaaggtcttatatctagcatctataaggaattgtaattactttacaagaaaagaacaaacaactgcataaaaaagtgggcaaaggggccgggcgtggtggctcacgcctgtaatcccagcgctttatgaggtggaggagagcggatcacgaggtcaggagattgagaccattccggctaacatggtgaaacccttctctactgaaaatacaaaaaattagccgggtgtggtggcacgcacctgtagtcccagctactcgacaggctgaggaaggagaatctcttgaacccgaaggcagttgttgcagtgagccgagatcgcgccactacactccagcctgggcgacagagcgagactcgatctcaaaataaaagtaggcaaagggctgaatgcggtggctcatgcttgtaatttcagcactttaagtggctgaggcaggtgcatcgcttgagcccaggagagaccagcctggacaacatggtgaaaccctatctctacaaaattagaaaaattaggcaaatgttaccccatgcaccagtaatcccagctactcagaaggctgaactgggaggatcacctgagcccaggcacaaattgcagtgagccgagattgctccgctgcacttcagcctgggtgtcagagtgagaccctgtctcaaagaaaagtagacaaaggacaggaacagacacttctcaaaagaagacatacatgtggccaaaaagcatatgaaaagaagctcaacatccctgaatgttagaaaaatgcaaatcaaaaccacaatgaaataccatctctcaccaatcagaatggctactcttcaaaagtcaaaaaataacagatgctagcaagcttgtaaagaaaagggaacacttacacattgttggtggtattagtttaaccatggtggaaagcaatgtgatgattcttcaaacagctaaaatagaactaccatttaacccatgtatcccatcactgggtatataccgagaagaatataaatcattctaccataaaaacatgtgcatgtgaatgtttattaccacagtattcacaatggcaaaaacatggaatcaacctcaatgcccatggaggacagactggatagagaaaatgtggtacatatacaccatagtattctatgcagcctcaaaaaagaatgagattatgtcttttgcagaaacatggatggagctgtagaccattttccttagcaaacaaatgtggaaacaaaaaatgaaatgctgcatgttctcacttagaagtgtgagctaaatgatgaggctcatggacaccaagaggggaacaacacgcaccggggcctacttgagagtggagggtgaaagatgggacaggagctgaaaaaatgactattgggttctaggcttagcaactggatgattaaatgatctgtaccacaaacgcccatgacacgagttttcctgcacatgtacccctgaatgtaaaataaaagtttaaaaaacaaagaaaaaaataatctcatctttcttctggaatctgcagcacaaccagtatccctgaaactttgatttacatggacaccaagagaaaggagagggtatagctagagcccagatgtgtgacagacagatgagagcagccctcacctggtagagccaatgggcctagggtggggcaggttcatgccaggactttctctacctctctcccagatcatcctgaggatcaagatcagtgctgtcccagaatgtttaaaggcagaaagaatgattaccttctagagccaacgactttaccaagaatcctcaccttaaaaaaatttatttttgtacaaattgagaaaatgtatatcttccgggtagattctctccggtgtagaaaaggtttgaggggcacaaaggctgtgctttaaaatcattcttccttgctccctcatcattatgcttgcatttccctggtaacccaatccacagcctagtacctctcccagtataatttcgctgcattacagacacaggcctgcaaacagctatggttttaactgagtttcttcctgacagctgagcctttctcaccctgcaagggaagcttgctgagaggaaattggaatcaggaatgaaagcagagggcatggtttacagggaccatttaaatgctgcaactcaaagattcacacagaagcccggacacaattccgaagttgcccagaggaagcaaaaatgtcagagctacaggtaagttgaataccctttatttctttctcctgcctgattgccctgaccagaacttccaacactatgttgaataggagtggtgagagaggcatccctgtcttgtgccagttttcaaatggaatgcttccagtttttgcccattcagtatgatattcgctgtggatttgtcataaataactctcattattttgagatacgtcccaccaatacctaatttattgagagtttttagcatgaaggttgttgaattttgtcaaaggtcttttctgcatctattgagataatcatgtggttttcgtctttggttctgtttatacgctggattacgtttattgatttgcgtacgttgaaccagccttgcatcccagggatgaagcccacttgatcttggtgaataagcttcttgatgtgctgctggattcagtttgccagtattttattgaggatttttgcatggatgttcatcagggatatttgtcttaaattctcttttttggttgtgtctctgccaggctttggtatcaggatgatgctggcctcataaaatgagttagggaggattccctctttttctattgattggaatagtttcagaaagaatggtactagctcctccttgtacctctggtagaatttggctgtgaatccctgtggtcctggacttttttggttggtaggctattaattattgcctcaatttcagagcctgttattggtctatacagagattcaacttcttcctggtttagtcttgggagggtgtatgtgttgaggaatttatccatttcttcagatttctagtgtatttgcatagaggtgtttatagtattctctgatggtagtttgtatttccgcgggattggtggtgatatcccctttatcattttttattgggtctgtttgattcttctgtttttcttctttattagtcttgctagcggtctatcaactttgttgatcttttcaaaaaaccagctccgggtaatggagtaatggatcttttcatatgcttagaagttgttaaagataatatcctgtgttttataatacctgtcctgctttacctttgtaagaatgcttgggtttcattttctgccaccattagcccaaatttgggctactgctcaacagtgaatggcagtcatggttcatggagctgaaatgaatgcattcaatgaacattgtcgaggactaaccctgtgagtggccatgtgcaagatgcaggaattcaagttcatgggcacagtcccttgccatggaaatcttctaggctagaggggaggctgagcaaacagggaccttatgacatggagtggtagagcctcaacagaagcttgtctactgggttcagttgtctgactaggagttttctcaggggaagttgtagtactaggacagagtggagaggaggctgaaagtttgtttggtttggtggtgtactgtctttctgatgcattttttccttttgtaggtaatggtaaatggccaacactgttacatatttgcccatcaactcctgcaagcatctgtgaatatgctctggatgtggagatgtctccatgagctcaacatctatgtgcagttgaaagagatgaccacaatccttgttgttgaggaatccctctttctacaagaccatgggattcccagagcctgttaacagaataatccctcctcaatcctttctatacacttggtcattaaaagttcggcaaattttccaggatttgatagtcatcccgacaggcgctgaaagattacatgggaagcattaagacatcaaagagtaaaaaccttcctatgactcaaggagtgagtaacacggtccctggaatgtctgagaaattaaaaacggcatccttctatagcacatagttgacatcaagcactcaactaaaacccttactcaatctcagatgactcattgcaaatgttgggtagctgtttacagccacacaggtataactggtagttttaagaagaaactgtaacattaggacaatcaggtggaatatcataattctacccgttgttccaaggatgcttactgtatatgaacactgtgcctcactctgtgcagactgccatgagggaactttagaaacagatgacaaattcctggccaggcgtggtggcttacgcctgtaattccatcactttcggagaccacggtgggcagatcacttgaagtgaggagtgtgagaccagactgcccaacatggcgatgccgtctctactaataatacaaaaattggctgggcgtggcagcaagcgcctgtaattccagctagttggaagggtgaggcatgagaatcacttgaacccagcaggcagaggtggcagtgagccgagtacacgccactacactccaatctgggtgacagagtaagactctgtctcaaaaaaaaaaaaaaaaaaaaaggcaaattacccacataaaaattttgctccaagcagtagttagagaatcacaaaagtttaatgatttctttcaatgatcctgattattcttgtttctaaatacttgaaatattttttcaatttatgtggacagaattctgggatttctctttggaaacaagtggtcatggttttcagatcagaaaatatgtagtttattgttgtaatagacacaattcatactacacacaggcacagtgaggagactctgctttgctgctgttacatttagacattgcagcacagcaagccttccaacacatattagctgaaagcaaccatttattctgatctctcccagctttgcaggtttactggacttatgaggttggtagatcatgtgctgggagtcacattttccaaagaatctgtggtctgggattccaggggatgcttcactcatgtctgactcaacactagggctgagtaaacacctgggggctggctggttatctccttctttgtctaaactctccattagtgccttgaatttcctcaaatcatgagagtctcatagttcttggacttaatggatggtgattggcttccaccaactaaagccttctgaaaggctcaaggagaaggtgtagggcattagagtacatagctttgaaaggcagacattgtcacttctatgacattatattgatcaagttgagtcatgcaggcagcccaaatcaaagaggaatccacaagctttggttattttgacttgtagatcctgagaggtcatccttggcaactatttccacgcagttccacacttatatgtgtaagtgtgtatataggcttacacacttcccacatactaaaaactctaaccctgtaaggaactactgaaagcaatacaattacaggaggcagctcagattgaagtccagcatcttatcatccaattactctcagatgtccatgaggagactacaaactgtcaggtgcactttctctcaaaatatgcaccaaagggatacatatttgccctatacaaatcaatcacacaagactgaaacagacaaaggaaaatgcagttaacacaactattttagaggggcaaaagataacaaatggcaccttttgcctcatagcactctgagaagcaagaggggtcaccagcagctctactagagccacttatgaaaattcagcctgggttctcactcttgtcgcatctgctcaaaccagcatagtctgttccggaaatactacctcaatgtgtgcccccagtgtttccataagtactttaaaaacatacatttcattaagttggactaagaggtcttctttgaatggataaccaaggcatccacacaacgaaagaaaccgtgttagctctttgtacataaatttaaaattcaaacaaacaaacaaacaagtacagaaaagaaaatagaccacagtcacggtccatatcactgaggaaaccaacaagatctcttttttcattttctctgggaacgtttccctgcagcaattggcttcatcctccattcttagcttcttggaactcctaccaagatggcagaatgacagtcctttttccactacaagagttttgattatctacttcatagtgcatatagagaaccatttaggagaagataaacaacatatttcctaaaagtcaacgaaggatgattgaagagagtctcatcaaatagccttttttctgctgggccaatctcaggcatcattttgatcatcgtcatcctctctccccaggttcattgccacagcttgttcaactccaaccttactcatgggtatgcctttctctgtactgcttctttaacctaacatctggataccttgaggtatcaatgcacagtgaattatgctcttcatgcctttcttccttgtttctttccagtataaaatgaaatttcctcccctctcattggaaactctcaggttctgattaggtacactctcctccttacaccatccctgtcacagtcctggtcaattctgtattttgatagtggattataggctccatcaccagcatggaattcatttgttggggatttaggcaattctttctctgagaggatgaagactatcctggaatctatgacttcctgagcagaacatgagtttgatttcatatctgcttgcctctggatgacacccattttatttgagtggcctacagagtcctacatgctggccttgcaacacacacagtgactcccatttcttggctgacattcaccagctcatttctgttcacatgggccatttgttacactcatttttatctcaggtaatacgttttgctcatggtggccaggatgacatctcagacacaaagagatgacatagaattcaggagccaatgtttaacaaagaatttttgaattgcctctggggacctactcaacatcattttcatactcctcaaccaaaattccctatcttctcccagcaaatacggcatgctcaaaacacagaaagtcgtacttggactctaaagctttcattctcaaaggtatttaggctttttagtttttgttgaagcctcccaaggaataaatctatttggtgataatattgtccttgtccctcaaagctgtttcacttgtggtgctgtccgtggtgctgagcattggtgcattaggccctgtatttgaaagtgaggagccaatacgacagagtaagagaggaattttgttttgttttcttttgtatttgctagaccatagacaaaacctccatgatgactaaaacagaaattcaacttggattttcaaaccacaatttcttcagtgccctctctcctcacttctatttaacataatattggaaggcctgaccagagcaatcacgcaagagaaaagaagaaagggtatctaaatacaaagagaggtcaaaccatccctgtttgcagatgtcatgattctatatctagaaaactccatagtcttcacccgaaagatccttaagctggtaaaccactttagcaaagtttcaggatacaaaatcaatatgcaaaaatcactagaactcctatatgccaacaacagcgacagggacaaatcaagaatgcaattccattcaaatttgccataaaaagaataaaacacctaaaaatacagctaatcagggaggtaaaagatcgttacaatgagaattacaaaacactactcaaggaaaccagagatgacacaaagaaatagaaaaacattccatgctcatagataagaaaaaccaattatcattaagacagccatactgcccaaagaaatttagatgcaaggctatttgtctcaaactatgaatgacattcttcacagaattagaagaaatattattttaaaatttaaatggaaccaaaaaaatgccaaataaccggggcaattctaagtgaaaagaacaaaactggaggcatcaaattacccaacttcaaaatatactacaaggctacagtaaccaaaacagcatggtatcggtatgaaaagagacacacagaccaatggaacagaatggaaagccctaaataaggccacaaacctacaaccatctggtcttcaacaaagctgaccaaacaagcaatggaaaaaggactccctattcaagaaatggtgctgggagaactggctagccatatgcagaagattgaaactggaccccttctttacaccatatacaaaagatagattaaagacttaaaagattaaacccaaaactataaacatcctggaagacaacctagacaataccatgtgggacataggcatgagaaaaatttcatgatgaagatgtcaaaggcaattaggagaaaagcaaaaattgacaaacagaatctaattaaactaaagagcttctgtacagtgaaggaaactatcaagagagtaaacagacagcctaaggaatgggagaaaatgttctcaaactatgtatctgaagaaggtctaatatccgagcatttataagaaatttcaacaacttcacgagaaagaaacaaacaaacccataaaaaagtgggtaaagagcttgacacagtggctcatgcctgtaatcccagcgctttgggcaaccaaggctggtggatcacttgagcccaggaatttgagaacaggctgggtaacatggcaaaaacccatctctactaaaaatagaaaaaaaaaatagcctagcatggagacatgcacctgtagtcccagctactcaggagactgagcttagaaaaatcacctgagccccggagccagaggttacagtgagccaagatggtgccacatcactccagcctgaatgtcagagtgagacctgttttaaaacaacaacaaaaaagttgagcaaaggacacgaacagacacttttcaaaagtaaggatacaggtggccaaaaaacatataaaaaagctcaatatcactgaacattagagaaatgcaaatcaaaaccacagtgagataccatctcacaccagtcagaatggctgttattaaaaagtcaaaaaaggacagatgcttcaaggttgtggagaaaagggagaactcacacattgttggtgacagtgtaaattagttcacccattgtggaaagcagtgtggtgattcctcaaagagctaacaatagatctaccattcaacccagcaatcccatcactgggtgtatacccagaagaaaagaaatcattctgccataaagacatatgcacatgaatgttcattgcaacactatgcacaatagcgaagacacagaatgaacccaaatgccaatcaatgacagatcggttacagaaaatgtggtacatgtacacaatgaaatactatgcagtcctaaaaaagaatgatattatgtcttttgcaggaacatggatggaactggaggccattattcttagcaaactaatgcaggaacagaaaaccaaatactgcatgttctcacttatcagcgtgaactaaatgaggaggctcatggacatcaagagggaaacaacacacactggggcctccttgagggtggaggatgaaaggtggaagaggagaaaaaaaataacttttgagtactacacttagtaaccaggtgaagaaatcatatacaccacaaatcccatgacacgactttatctgcatatgtaccccgaacctaaaataaaatgaaagaaaaatcaaataaaaacaacaatctcaccttcctcccagaatctgcaggagaaacagtgtctctgaaacttttatttacatggacaccaagagaaaggagagggtgtagctagagcccaggtgtgtgacagtcaggtgagagtggcccttacctggcagagccaagcagcctagtgtggaataggttcatgcaagaaatttctctgcttctctccacagatcctcctgaggatcaaggtcagtgctctcccagaacgttcaaaagcagagagaatcattaccttctagggctaatgtatttccccaaaatctccaacttttttcttttcagccgttgtacaaattgggaaaatgtacactttctgggtatattctgcatagatgagaaaaggcttgagaggcataaaggctgggctttacaaccactaccgctcactccatcatctttatctatgcatttccctggtaacccaatccacagcctggtaactcccccactgtcacttctgctgcattacagatacagacctgcaaatagctatggttgtgactgagtttcttcctaacaactaaacctgtctaaagctgcaaggaaatcttgctgggaggagcttggaatctggaatgaagcccgagggcaaggctgaagtgggtcatttaaatgctgcaactcagagattcactcagaagactggactcaattctgaaggtcgccaagaaggagagaacaatgtcttctttacccgtgagttgaaaaggcacagccttcaaaaatttcgtgtcacacaaaccaagaaagaaatgggagattttatgagatgaaaatatgagcatttttgctgtgaatgctttacttagagctattgaggtgtggaatagaaaccctgaggctatggtatctgagatgcttgtggggattgcggtgtggaccctggaccagtgtaaccttcggtgagtgtgaggtggtgtctgatgagcataaactctgcggagataatgtgactttaagtgggaggtggattacccaccaggacgagcaggtgtgtgaatggagagtaaaggggtgagtcggctttgtttcctgtctatgatgtgagtatgtgtgtgagcacagccagaccagtgcatgagcatcgttatgtgcacagtgagcaggtgtgtgtgacgcagtgagtggtgtggctctgtgtgactgtgagtgtgtgtgctgggatgtgactgtatgttgaagtgggatcatgcatgtggctttcttcacatgtgaatgtttctccccacacagcagcacctctgatgtgaatcccatgtggcttaactggtggggatcttggggattgtgagttaccaaggacttatttcagatcacttgtgagagcagaatgtatgatcagtagatgtctcttcccagtaagagtggggaagaggaatgcagactatgggggtgatggttcctcaggtggggtctgcacagagtgaccactgtctcttgcctcccaggctcagcttgcctgtccctagcccatccagttcttcccactgtgtgacaggagggtgtgcagatactggtttgttagggaaggacattagaggccgtgatttcagagactgaatcacacaaaatatccactgtaagctctgtctgaactgagactaaacttgttctacacccatgaaagaacaagttaagtctcagttcagaaggagcttacagtggatattaatcaaccaagcagctgggttcactggcttatggctataatcccaccaattttggaggcaaagatgagaggataacgaggccagaagtttgagaccagtctgggtatcagagtgagaccctttctttaaaaaactttaaatatttgactggcagagaggcaggtacctttcttcccagctattcaagagggagcagatgtgtgagattcactgcagcccaggagtctgaggtttcagtgaaccatgattgcatccctgcatgtcagcctgggtgacagagcaagaacctatctcaaaagtacagaaaaatcatctcatctacttgtagtcatcatagaaatcaatcattccctccagttatgtccctgacccacaagcttcatttgtgcaagtactggggctgtgctctcagtagtgtgtgccccttcttggaaggatgtccatggcccttgatgatagtgatgcatgtgcatcccacacacaggggtttcctgttctttcatcatttccctctccctttcaacaagtgttgtttctcactggagtgaatgtttaaattcttacatttacaagtcttgttttaattttcagagttgaaaatgaaggcaggtcagtctttcaagaggactctcctgtcctgttaggtcaccctaagaggccctacgcatgacagggattagggtaacacttttacatgtattaactccctattacggagaacatcctacaaagtagaaattcctgataatcctcgttgtcctagggaaaatgagggagagttcaagtagcaaatctaagactgcactgctagtaaaaggcagaatgaggactggaatccaggcatcctggctcctgaacccttgctctaacttatgggtccgccatatcttcaggaatatggggccctgaatgcggtagggttaaagaggagagtccacagagtctgccctttcatctccaacctcctgcaccatgagaatatgttacaggaggggagactgcacctgaccctgcacctctcacttactctcaatactctggcaggtgccatacaaactgcctgtgtctttgtctgttggttcctgcgtgataatcaaagggacaccaatccactcttttatgtgagtactccatggtccaatggaggggttggagaagaagggagaatatttgcgaagatttgaccttacatgtgggtgatgtggaaatgtctagttggcagaatggaggccccatgcaggtgcaggtcttggagaccctccagcaccaggcatgagacccacagcaactgcatgtgggccagccatggggcctacaggaggagaacactcagtgggttggggctgtggctctttatcagggggcatagaattttcgggaatgaacaagtcataggcccaggtcagtgactgtggctcagttttcatctggggatgaggagcacagaatctccctgcctgggggcatgaggagctgaagcatccccacagggacctggccatcagtattatctgggagactttttccctaggtaaatgggggaagggatttgtgtgtgtgtcgagtgtgtgtctgcgcaagggagggacctgcccaacattctgcgtgcttcaccctcagcaatgacccacagctgcaggtggatttctacactgacatggatgaggattcagatattgccttccgtttccgagtgcactttggcaatcatgtggtcatgaacaggcgtgagtttgggatatggatgttggaggagacaacagactacgtgccctttgaggatggcaaacaatttgagctgtgcatctacgtacattacaatgagtatgaggtgagcatcccaggagctcccagcacccaggctctgtgggctcccaaaacaggaggcagctctcattgatctggcctcagtagtccgtcagggtccatctcccataactactcctgcccctggttttcatcacagagcaccccctgcttgcactgccatcctcagctctttcccaaatctgaccaatgtcaaggtcagctcacctgacatttcccccaaagtagataatctcctctgtcttttcacatactgctcatttctacttatgccattatttaaattttcatttagctgagtgaatacaatatacttcaggaaaaaaaagtttaaaaaaaaaaggttgttttaatcagtcacaaattaagtctttgtctcattttggggcccgaattctaccataggaaaaacattaccagagctctgctttcattcaaagaggttttgtttgtttgtttgtttttgtttgtttgttttcttgagatagagtctcatttttcatccaggttggagtgcagtggcatgatatcagctcactgcaacctccacctcctggattcaaacaattctctcgcctcagcctcccaagtagctgggactacaggtgtgtgccagcacacctggctaatttttgtatttttaggggagacgggggttcaccactttggccaggctggtcttgaactccccacctcaagttatctgcccaatttggcctctcaatataatgggattacaggcttaagccaccatgcccagcccttcagaggaaatttttgcttatggaagcatatagatatgtctatgatttcatttgtttttaagcaaatcctggtataagttgctctacacattacgcttcaagaactaagttgatttgttgccaaagaatatatattgaagacattatcaatctgtcgtgctgcttcagtttttaaagattgcataatattgtgttaagaagtttacccaaagttgtggaacttggcccttttgggggcactaaatttccttccagtattttgctctcacaaatgatgtcgtattaagttttctaatcaatccttttgtcattaccaacctcccaatacttgtactagaagataattacaaaaaaatggaaaaactggctcaaaaatgtgtgcattttaaattcgaaaaattaatactaataaggttactttctctatagcctcaatataaagaatacatccatactttctggctttctctaacgagtaggccaaaacattcacatcttattcagattcaagcgagggatcttttcctatgcttagaagtttttgaaggtaatatcctgtttcacaagaacagttctcctttcattctataagaaccctgggtttccttctttgccactaacacctcagatgtaggttactccaaagagaaactgtgccatcagtagtgaaaaacaatcacagttcatggaactgaaaagtatgcattcaacgaacatggtctagcactaaccctgtggcaggtcctgtgcgagatgcagggtctcaagttcctgagacacagtccctggcgatggggatcttccaggttagaagggaggctgagtaagcaaagactttgtgacacagagtatagaacttcgctagaggaatgagtggaaacattagaaataaagtcgggtactgtctcaaataggcacaaaacgtcatctgtaaacataagtgtatctaatacgttaacttgtataactaggaattttcttggggaatgttatttgtaccaggacagagtggagaggaggccgaaaacttgtttggtggcatgctttctttctgatgcatttttcctcttgtagataaaggtcaatggcatacgcatttacggctttgtccatcgaatcccgccatcatttgtgaagatggtgcaagtgtcgagagatatctccctgacctcagtgtgtgtctgcaattgagggagatgatcacactcctcattgttgaggaatccctctttctacctgaccatgggattcccagaacctgctaacagaataatccctgctcacattttcccctacactttgtcattaaaacagcacgaaaactcacatgatttggttcttgctttcagaggggaaaagaggaagttgtcatccccaaggggggccagggcattctatgggaggcatcaggaaatcaaaggggataaaccttcctgtgacaaagggagtgagtgacaaggtccgtggaatgtctgagaagacattagaaacagcatccttctatagcacgtagttgacctcagacagtctgagctaaaatacttacccaatctcaaatgactcaaggcacttaaatgttaggtagctgtttacagccacgcaagtgtacatggtggctttggggaaaatctgtaactcgaggaaaattatgtggaatttcttaatttttttccattgttctcaggatgcttactgtgtatgaacactgtgcccggctttgtgcgggctgctgtgaaggaactgaagaaaaagatgacaagtttgcatgtgaagttttcaatccaagtaatagtttagagaatcactggagcccagtgatttcccttaaagaatcccaattattcttattttcaaatatttgaaaattgcttcattttatgtggggagaatccaggggtttctctttggaaatgaatggtcatgatttgagatcagagaacatatagattattattggaatagatacaagtcacgtacattgacacagtgagcagacccttatttgttgcttttccagtgatgaattgcagcacagcaaacctcacaacacacatcggctaaaagcaatcatttattttgatctctccccgcttcacaggtttactgaacttaagtgagtggtagattatgtgacgggagtcgcgttttctgagagatcttttaggctgggatttcagaggatgctttactcatgtccaactcaacagcaggactgggtgaacacatagaaactgggaagctgtctccttcaatacctcaccttcccatgcatgacattaatttcctaaaatcaggagagtctcatggttctgggacttaataaatggtgattggctttcaccaaagaaagcctttcaaaaggctcatggagaaggtgcacagcatcacaggacttacctttgaatggcagacagtgttacttctaaggttttacattgatcaaggtgagtcatacagacggccctaatcaaaaggagaggactccacaagctgtggttattgtgactgtagtcatgaggggccatccttggcaactagttccactcagaactagttcccacataccgaaaacactaaccatgtaaggaatctcaggctgggcgcggtggctcacgcctgtaatcccagcactttgggaggccgaggcgggcggatcacgaggtcaggagatcgagaccatcccggctaaaacggtgaaaccccgtctctactaaaactacaaaaaatagccgggcgtagtggcgggcgcctgtagtcctagctacttgggaggctgaggcaggagaatggcgtgaacccgggaggcggagcttgcagtgagccgagatcccgccactgcactccagcctgggcgacagagcgagactccatctcaaaaaaaaaaaaaaaaaaaggaatctctgaaggcattacaattgcaaaaacaggctcagagtaaagtgcaatatcttatctgatcaggacaccgtgtctatgatgtgactacaaattatcacttgcaatcccctgcaacatgtgcaccaagggggcacattatctgctttatactaatcaaagaagactgaacgagacaggaaaagtgcaatgaacacatatattttagatgggcaaaaaaaaaaaaaaaaaaaaatagacagcagtcactaatccatatttttgctgaaaccaaccagaaaactatttacattttctctgggaatgtttttctgtagcacttgtccccaccctccattctcagtttcttggagttcctaccaagacggcagaatgacagcccttttcccactataagagctgtgattatctacttcatagcatgtatggaaaaccacttaggagaacagaaacaacatattacctaaaaatccatgaagctagaatgaagagagttccagaaaatagcgtctttgtttgcaaggaccatcttaggtgtcattttgatcattattttctctccccatgttcattgcaacagtttctgcaactccaacctcactcatgggtatgcctctctccttacacttcctttaacctaacttccagacactttgaggtgccaacgcacagtgaatgaaactcttcatgcctctcttccttgtttcattccaggatggaataaaattccctgccctctcactggaaactcttgcgttctgattaggtacactcttctccatacacttatacagtcttgatcacttctcattttgataatggatcatagaccctatcaccagcatggaattcatttctttgggaactatgcagtttgtgctctgagtggatgaaacctatcctggaacccctggcttcctgaacagaagacaacttggagtttatatctacttgctgcttgcctggcgcccattttatgtgaataaccaacaaagtcctaaatttcagccctgctaggcaaacacacagtgactgccctttcttgaatgatattcaccagctcagtgcacttcctatgggccattcgttacattcatctttattcagctactactctgagctcatagtggccaggaatgacatctcagatacaaagagatgacatagagtccagggccaatgttcaactaaaaatttttgaattgcctctggaaacctattcaacatctttcttcatcctgctcaatccaaattcatgatcttctcccagcaaatagggcattgctcaagaagcagaaagccatttctgaactctaaggcctcctcatcttaggtcttttggtcttcccagttattgctgaagcccccaaagaataagtatactctgtgataatattgcccttgaagcccagttccctcagcattgctattcctttgggatgccatctgtgatgctactaaacactggtgtatgttggcctctatttgcaagtgaggggtcaagaagatggaataaaagagaaatttaaaaaattttccccaatttatttatgtttaccatttttatttgaagttcaagtgtacatgtgcaggtttgttatataggttaatcctttgtcatgcgtgttagttgtacagattatttcatcacccaggtaactaaacaaagtacccaatggttattttttctgctcttctctcttttcctacccctccactctcaggtaggccccagtttgtgttgttcccttctttgtgtttatgagttctcatcatttagctcccacctataagtgagaacatgcagtatttttttctggtcctgcattactttgctaaggataatggcctctagctctacctatgttcccgcaaaagacatgaccttgttctttttatggctgcatagtattccatggtgtatatgtaccacattttctgtattcagtcagccattaatgaacatttaggttgattccatgtctttgctattgtgaacagtgctgcaatgaacacttgtgtgcatgtgtctttatggtagaatgatttatattctaatatttatatgtatttttatttcaataatttttgggacccaggaggtttttggttgcatggttacattctttggtggtgatttttgagactttgctgtacccataacctaagcagtgtacactgtacccaatatgtagcattttatctgtcacccctcccacccttccttcgagtctccaaagttcattatatcatcttaatgcctttgcatcctcatggtttagctcccacttatgagtgagaacatacagcatctggttttttattcctgagttgcttcacttagaacaatgacctccagttgcatccaagttgctgcaatggccattatttctttctgcttttatggctgagtagtattccatggtgcatatttaccacatgttctttctccatttattgatccatgggcacttaggtagattccatgccactctaaacatgtgtgtgtatgtctcttttctatataatgacttcttttcttctggataggtacccagcagtggaattactggatcaaatggttgttctgctttcagttcttgaaagaatctccatattcttttccacagtggttgtactagtttacagtcccacaagcagtgtaaaagcattccattttcaccacatccacaccaacatatattcttttttaatgttgtatttatgatcattcttgcaggactaatttggtatctcgttgtgggtttaatttgcatttcactgatgattagagatgttgaacattttttaatatgtttattggctgcttgtatatccttttttgtctccgtactaaaacattattttatttttatgttgtttttgaacctattaattcagtttatttttttccataaattattggggtacaggcggtatttggttacatgaataagttatttattggtgatttgtgagattttggtgcacccatcaaccaagcagtatacactgcattatatttgcagtctcttatccctcacccttccccaacacttcccttcaactccccatagttcattatatcatttttatgccttggtgtcctcatagcttagctcccacatatcaatgagaacatatgatgtttggtttttcattcttgagttacttcacttagaatgatagccttcaaattcatccagatcactgcaaatgctgtgaatttattcctttttatggctgcatagtattctgttatgtgtgtgtgtatatatatataccacagtttctttatccactcgttgaatgatgggcatttgtgttggttccatgattttgctactataaattgtgtcacagtaaacatgggtgtgcaaggatcctttttgaatattgacttcttttcctctgggtagatacccagtagtgggattgctggatcaaattgtagttctactttttgttctttaaagaatctccacactgtcctccatagcaactatacttatttacattcccaccatcagtatagaagtgttccctcatcaccgcatccatgtcaaatctactgttttttgtttgtttggctggttggttggttgaaaagttggttggttggttgtttattatggccattcttgcaggagtgaggtgttatcacattgtggttttgatttgcatttctatcatgattagtgatgttgagcattttttcatgtgttgtttgtccaattgtatatcttctcttgagaattctctattcatgtctttagcccatttttcaatggaattgtttgtatttttcttgctgatttgtttgagttctttgtaaattctggatattagtcttttgtcgatgcatagttgtgaatattttttccccactctgtgagtggtctgtttactctgctgattatttcttttactgtacagaagattttagttaggtctcatttatttatttttgttgcatttgcttttgggttcttaatcatgaattctttgcctaagcgtctagaagagtttttcaaatgttatcttcttgaatttgaatggctccacatcttagattcaagtctttgatccaccttgagttgatttttttataagatgagatgagaatccagtttcattcttctacatgtggcttgtcagtgttcccagcaccattcattgagtgcggtgttcttcccccactgatatggtttggatctgtgtcctctccctaatcttacatcaaattgtaatctccaacgttggaggagggacagtgaggtccaggctgatgaggtctcaggtggggataaagaacttattggaagttggaataagggtcactcttaccatgctttagcaaagagactggtagcattttgtccctgctctatagatctgtggaacttcaaacttgagaaaggtgattaagggcatctggcagaagacatttctaagcagcaaagcattcaaaagtagcttgacagcttctaacattgtatggtcatatgcatgaaaaaagagatgatctgaaactggaacttatatttaaaaggggagcagagcataaaagtttggaaaatttgtagcaagatcatgtggtagaaaagaaaaattcattttctggggaggaattttcaagtttgctgcaaacatttgcataagtaaagaggagccaaaacaacaaatgcctcaaaggcatttgttgatcttcacggcagcccctcccatcataggcccagaggcccaggaggaaagaatggttctgtgggctgggcccagggccctactgccctgcacaatcttgggacactgctccctgagtcccaactgctccagcttcagccgtggctaaaagtgtgccaaacatgtctcaggctgctacttcaaagggtgcaagtcataagccttgaaaacttccatgtgattttaagcttgtggtgcactgaaggcaagatctgaggcatgggagcttctgcctaaatttcagaggatgtatgggaaagcctggatgtccaggcacaaatctgctgcaggggcagagaccttacaaagaacctctactagggaagtgcataggggttgagcccccacacaagaccacactggggtactgcctagtggagctgtgataagagggctaccatcctccagaccccagaatggtagatccactgacagctcacaccatgtgctgggaaaagctgcaggcactcaatgctagcctgtgaaaacacccatgagagctctaccctgcaaagccacataggcagagctgcccaaggcctggaagaccacccttggcatcagtgttggctggatgtgagatatggactcaaaaaagattatttttgagctgtaagatttaatgactgccatgctgggtttcagacttgcaggggcttggagcccttttgttttggcagatatttcccttttggaaaggaagtatttacccattgcttatacctccattgtatcttggaagtaattaccttgttttttattttacaggctcataggttgaagggatttgcattgtctcagatgagactttggactttaggcttttgaattaatgctgaaatgagttaagactttggggaactgttgggaaggcatgattatattttgcaatgtgagaaagacatgagatttgggaaaggccaagggtagaaatgaatgatttgggtctgtttccctgttcaaatctcacaacaaattgtaatcctcaaggttggaggaaggtagtagggggaggtgattggatcatgagggtggatttcccttttgctgttctcatgacagtgagtgaattctcaaagatctggtcatttaaaagtgtgtaacacctctttctttgttctctctttctcctaccatgtaagacatgccagcctcctctttgccttctgcataattgtaagcttcttgaggcctccccaacaatgcttcttatacagactgtggagttgctagccaattaaacctattttatttataaattattcattgtcaggtatttctttatagcagtgcaagaatggactgatacatccacttcaagcttttgtatgctttgttgaagatccattggctgtaagtatttggctttatttctgggctctctattctgttattggactacatgcctaatttttttttaccagtacctgctgttctgttaactattgccttgtagtttaatttgaagttgggtaatgtcacacctccagatttgttctttttgctttgttattgctttctctatgtgggctctcttttgattttgtataaattttaggatttttttttgaagttctttgaaggatgatgatggtattttgatgggaattgcattgaaactttagattgcattgggcaatatggtcattttcacaatatttattttacccaatcatgagcattgggtgtgttttcatttgtctgtgtcatctatgattttagagacgagctctggctctgtggtccaggttggaataaagtggtgtgatcatggctgtctgcaacctcaaactcctgggctcaagtgactcttctgccttggcctccaaaagccctgggattacagtcatgagccaccacacctaaacccatggaccattgttttttaaaagaaaaacaagttcattaaccctaagggtagcctccaggagttaggatatggcgttaaccaattaatagtgacttatgcatggaggaagaaaggaaaattaggaagacaaatctcttataattttcatcatacaatcttggttacaaacccagtcggtagaatgcagtcaatgacctgctgacatgggggtacaaaaggccacccttttacctcaaagagcaactctgctgtgcagttcacactccagtgcttcttcctgaaataagactaagctacatctagctgttccaattctgttccaactaagcagccactctctaaccactgacaatccctaatctgttcttctatctctatgatttgcatatcctggacatttcatgtaaatgaaatcatacaattggatttttgtgtctggcttttttccacttaaaacattaaacacataatgttttcaaggttcatttatgttgtagcatgtatcagtattccttctttttgtagctgaataatattccattttgtgaagatatcacaatttgtttatcctttcagcagttgatggacaattgggttgtttctactctttgactattgtgaatagtgatcctatgaacatttatgtacaagtttttgtttgaacacctgtatccaagccaagaagttgaattgttaggtcatattatacttttatgtttaactcattaaggaaccacaaaactattttccacaaaagtgatgccattttacatttctgtcaccaatgcactagagttctaaaaattttctgcatcctcaccaactcttgtttttcctttttaaaattataaccatcctagtgggtgtgaagtagtatctcatcgattattttgtgtgtgtgtaattttatttattaattgtttaattttttattttcatacatttttggggaacaggtgatatttggttacatgagtcagttctttagtggtgatttgtgagactttggcacacccaccacccaagcagtatacactgaacccaatttgtagtgttttatccctcaccttcttcccacactttctccttgagtttccaactttcattgtaccattcatatgcctttgtttcctcataatttagctcccacttatgcgtgagaacaaacaatgtgtggtttttcattcctgacttacttcacttagaataatagtctcctatctcgtccagattgctgcatatgcaattaactcattcctttttctggctgagtagtattccattatatatatcacagtttctttatccattcattgatgagtatttcagctggttccacatttttgcaattgtgaattgtgctgctataaacatgcgtgtgcaactatcttttttgtataatgacttcttttcctctcagaagatacccagtagagggattgttggatcaaattatagttctacttttaattcctgaaggagtcttcacattgatttccatagtggttgtactactttacatttccaccagcaatgtagaaggtccgttttcactgcatccacaccaacatcttttattttttggttattttattgtggcctttcttactggagtaaggtggtatcgcattgtggttttgatttgcatttccctgatcattagtgatgttaagcaggctttcatatgtctgttggccatttgtatatcttcttatgagaattatctgttcattttcttagaccacgttttgataggattgtttgtttttttcttgctaatttgtttgggtttgttgtaaattctggatattagtcctttgttgaacatatagattgtgaaaattttctcctactctgttggttgtctgtttattccgctgagtgttccatttgctatgcaaaatgcttttctttaattaagcctcatctatatatttttgtttttgttgcatttgtctttgggttcttggtaatgaaatctttgtgtgcagactcaacaggcagggaggcatgaaaaccttgcttgctttcttagatggaaggctgttagcctgggacaagttctcagcccttgtcacccactgcctggaaacaaactcagtgctgttggggacagcacaacgggagtgagaccagccttttgggttgcaggggagatggaggaggcctgtaactgccagctttcccccacttagatgacaacctgtatgatacagcagaggcagccataattcttctgggaaaataacaccactcatctcagaaccacaccctgaacccccaccacagccacagcaagccccacccaaggagcccaaagaggatctgtgctcagacatgcctaacactgtccccatctgatggtcctttctgacccactttggtagctgaagatagatgtcctatttttgatttgcatttccttcatgactaatgacattaaataccttcttgtgtgcttgatggccatttgtatatgtttttgcagacatgtcatttgctcatttttaaattgggttgcttttctttttgctgtttagttgtgaaagttcttcatatattctgaatactagacacttaccaagtgtatgatttgccaatacatattttccattctgcaggttatcttttccctcactttatagtgtttttaatgcataaaaatttttattttaatgtggccaaatttattatttttttttattactcgtgcctctggtatcatgttgaagaaaccattgccaaatccaagatcaggaagattcattcttatatttactgtgagtatttggcagttttatctcttacatttgggttgttgacacattttgagttaatttttttcaattataatttaagttctggggtacatgtgcagaacattcagttttcttacataggtatacatgtgccatggtggtttgctgcacccatcaacctgtcacctgcattaggtatttttcctaatgctacccttcccctagcccaccactccctgacaggtcccagtgtatgatgttcccctccctgagtccatgtgttctcattgttcagctctcacttataagtgagattatgtggtgtttggttttctgttcctgtgttagtttgatgagaatgatggtttccagcttaatccatgaacttgcaaaggatgtgaactcatcctttttgtatggctgcatagtattccatggcatatatgtgccacattttctttatccagtctatcattgatgggcatttgggttggttccaagtctttgctattgtgaatagtgccataataaacatacatgtgcatgtgtctttatagtagcatgatttataatcctttgggtatatacccagtaatgggatcgctgggtcaaatggtatttctagttctagatccttgaggaatcaccacaccatcttccagaatggttgaactaatttacactcccaccaaccgtgtaaaagctttcctatttctccacatcctctccagcatctgttgtttcctgacttatggatgatcaccactctaactagcgtgaggtggtatctcactgtggttttgatttgcatttctctaatgaccagtgatgatgaggtttttttcatatgtttgttggctgcatgaatatcttctttccagaagtgtgtgttcatgtcttttgcccaatttatgacgggattgtttgtttttttcttgtaaatttgtttgagttctttgtagattctggatattagccctttgtcagatggatagattgcaaaaattttctcccattctgtaggttgcctgttaactctatgatagtttcttttgctgtgcagaagctctttagtttagttagatcctatttgtcaattttggcttttgttgctattgcttttggtgttttagtcataaagtctttgcccatgcctatgtcctaaattgtattgcctaggttttcttctagaatttttatggttttaggtcttacgtttaagtctttaatccatcttgagttaatttttgtataaagtgtaaggaaggggccaatttcagttttctgcatatggctagccagctttcccaacaccacttgttaaataaggaaacctttggtaccagtaccatgctgttttttgtttgtttgtttgtttactgtagccttgtaatatagtttgaagtcaggtagcttgatgccctcagctttgctcattttgcttgggattgtcttggctattaaggctcttttttagttccatataatgtttaaagtagttttttccaattctgtgaagaaagtcaacggtagcttgatggggatagcattgaatctattaaattactttgggcagtatgacctttttcacaatattgattcttcctattcataaacatggaatgtttttcgatttgtttgtgtcctctcttattgccttgagccgtggtttgtagttctccttgaagaggtccttcacattccctgtaagttgtattcctcagtattttattctcttgatagcaattgtgaatgggagttcactcatgatttggctctctgtttgtctgttattggtgtataggaatggttgtgatttttgcacattgattttgtatcctgagactttgctgaagttgcttatcaacttaaggagattttgggctgagaaagtggggtttttaaatatacaatcatgtcatctgcaaacagagaaaatttgacttcctctttttctatttgaatatcatttatttctttctcttgcctgattaccctggccagaacttccaatactatgctgaataggagtggtgagagagggcatccttgtcttgtgctggttttcagaaggaatgcttccagtttttgcccattcagtatgatattggctgtgggtttgtcataaataacttattattttgagagatgttccatcaatacctagtttattgagagtttttagcataaagggatgttgaattttgtcgaaggtcttttctgcgtctgttgagataattgtgtggtttttgtcattgattctgtttatgtgatggattacgtttattcatgtgcgtatgttgaaccagccttgcatcccatgtatgaagctgacttgatggtggtgtataagctttttgatatgctgctggatttggtttgccagtattttattgaggattttcacatcgatattcatcagggatattggcctgaaattttctttttttgttgtgtctctgccaggttttggtatcaggaagatgctggcctcataaaacgagttagggaggattctctctttttctattgtttgcaatagtttcagagggaatggtgccagctctgctttgtacctctggtagaatttggctgtgaattcatctgcttctggactttttttggctggtagtctattaattactgcctcaatttcagaacttgttatcggtgtattcagggatttcacttcttcaaggtttagacttgggagggtgtatgtgtccagaaatttatccatttcttgtatatttgctagtttatttgcatagaggtgtttatagtattctctgatggtaggttgtatttctgtgagatcagtggtgctgtcctctttatcatttttattgcatttatttgattcttctctcttttcatttttattagtctggctagcggtctattttgttgatcttttcaaaaaatcagctcttgggttcattgatggttagaaaggtttttcgtgtctctatttccttcagttctgctctgatcttagttatttcttgtcttctgctagcttttgaatttgtttgctcttgcttctctagttcttttaattttgatgttagattgtcgattttagatctttcctgctttcccttgtgggcatttagtgctataaatttccctctccacactgctttaaatgtgtcccagagattctgctatgttgtgtctttgttctcatttggttcaaagaatatctttatttctgccttaattttattatttacccagtagtcattcaggagcaggttgttcagtttccatgtagttgtgtgattttgagtgagtttcttaatcctgagttctaatatgatagcactgtggactgagagatgtttgttatgatttccattcttttgcatatgctgaggagtgttttacttccaattatgtggtcagttttagaataagggcgatgaggtgctgagaagaatgtatattctgttgatttggggtggagagttctgtagatgtctattagggccgcttggtccagagctgagttcaattcctgaatatctttgttaattttctgtctctttgatctgcctaatattgacagtggggtgttaaagtctgccactattattgtgtgggagtcagagtctctttttaggtctctaagaacttgctttatgaatctgggtgctcctgtattgggtgcatatatatttaggatagttagctcttcctgttgcatttttccctttatcattatgtaatgcccttctttgtctcttttgatctttgttggcttaaagtccattttatcagagaccaggattgcaaattccgctttttttttttttttttgctttccagttgcttggtaaatattcctccatccctttattttgagcctacatgtgtctttgtatgtgagatgggtctcctgaataccgatgggtcttggctcttaatccaatttgcctgtctgtgtattttaattggggcatttacctcatttacatttaaggttaatattattatgtgttaatttgatcctgtcattatgatgctagctgattattttgcccattagttgatgcagtttattcatagtgttgatggtctttacaatttggtatatttttgcagtggctggtaccagttattctttccaagcttaatgcttctttcatgagctcttgtaaggcaggcctggtggtgacaaaatctctcaacatttgcttgtctgtaaaagattttatttctccttcacttatgaagtgtagtttggctggatatgaaattctgggttgaaaattcttctatttaagaatgttgaatattggcacccactcttttctggtttgtagggtttctgctgagaaatccactgttagtctgatgggcttccatttgtgggtaacccagcctttctctctggccgcccttaatattttttccttcatttcaaccttggtgagtctgacaattatgtgtcttggggttgctcttcttgaggagtttctttgtggtgttctctgtatttcctgaatttgaatgttggcctgtcttgctaaattggggaaactctcctggataatatcctaaagagtgttttccaacttggttccattctcctcatcacttttcaggtacaccaatcaaatgtagatttggtcttttcacataatcccaaatttttggaggctttcttcattccttttcattctttttctccaatcttgtcttctcacttcatttcataaagttgatcttcagttgctgatatcctttcttccactcaattgatgaggctattaatacttgtttatgcttcatgaagttttcatgctgtgtttttcagctccatcgggtcatctatgttcttctctaaactggttattctagttagcaattatctagccttttctcaaggttcttagcttccttacattgggttagaacatgctcctttagctcagaggagttattaccaaccttctgaagcctacttctgtcaactcgtcaaactcgttctctgaccagttttgttctctggctggtgaggggttgtgatcctttggaggagaagaggtgttcttgtattttgaattttaagcctttttgtgctggtttctccccatcttcatggaattatctaccttggtctttgatgttggtgaccttcaggtggggtctctaacggtcagtcccctctgctgcaggtatgatggagtttgctcgaggtccactccagagcctgtttgcctgggtatcaccagtggaggctgcagaacagcaaagattgttgcctgttctttcctctggatgctttgtcccagaaaggcccctgccagatgtcagccagagatctcctgtatgaggtgtcactgagaggtgtcttgcagtcaggaggcacaggggtcagggacccacttgagtaggcagtctgacccttggcagagcttgaaccctgtgctgggaggtctgctgccctcttcagagccatcaggcagggtcgtttaagtctgctgaagctgcacccacagctgcccattcccccaggtgctctgtccaagggagatgggggttttatctataaatccttgcctggggctgctgccttttttttagagatacccttctgcagtggccttgctgagctgtggtgggctctgcccatttcgaacttcccggtggctttgtttaccctgtcagtggaaaaccacctactcaagcctcagcaatggcagacgcccctccccccaccaagctcgagtgtcccaggttgagctcagactgggagaatttcaagccagtggatcttagtttgctgggctccatgggggtgggacccgccaaaccagaccacttggctccctggcttcagtcccctttacaggggagtgaatggttctgtctcactggcattccaggcaccactgggttatggcaaaaaaaaaaacaaaaaacaaaaaacaaaaaacaacttctgcttttgtgcttgaaacccagggccctggtggtataggtaccggaggtaatctcctggtctgcgggttgcgaagacagggaaaagcacagtatctgtgcggagctcttcattcctcaggcacagtccctcacagcttcccttgggtaggggggataatcccccaaccccttgcacttcctgcgtgaggcgatgccccaccctgcttcagctcgcccttcatgggctgcacccactgtccagtagcgatgagatgaaccgggtacacattttgagttaatttttgtgtatggtataaggtgagggttcagcttcattgttttacatgtactgaatatacattcagtacaacaaacctccttgacctgtataacaagcctgcacatcctgcacatgtacccctgaacttaaagcttaaaagctaaaaacaaacaaacaaacaaaaccaacaaggctgggagctgtggctcacgcctgtaatcccagcactttgggaggccgaggcgggtggatcacgaggtcaggagatcgagaccatcctggctaacatggtgaaacccccgctctgctaaaaatacaaaaaaaaattagccgggcatggtggcgggcgcctgtagtcccagctactcaggaggctgaggcaggacaatggcgtgattccgggaggcagagtttgcagtgagcagagatcacgccactgcactccagcctgggcacagagtaagactccctttcaaaaaaagaaaagaaaagaaaagaaaaccaacaaaacaaaaataatttattcaagagacaattccttcccacattgaatgatcttggcacccttgttgaaatcaatttacaatggatgtttaggtttatttctggactctcaattctgttccattgatctataagtttacctttaagccaatatcaatgtattttgattactgtagtttcattatcacagcattaactttgacatctgggatttgttgagaccatgcagtcagcttcctttgcagatatgccatgttttttgaaattacatcctccatatgagtttcagcactcagtactctcttccctgtgcttgcaggatgtgagggtttctttaaatgctatcaccaggaacatctagtgttcaaaatgtgccttgaattggtagttggtgggcactaatgtgtccctctttttctttccttctttctttcattctttctttttttaaaaagaatttcaatgcagttaaaaccaaagcaagtacttccacaatcctgtgattaccattgtacccctacaattctagtgccacagctactgaagtcattcgccttctctcagcactttctgtcaataaagcacaggtgactattcttagtagttgtgatactaataattgtaatacaaagcaatatttagtaactgtgatacttactatgtcatgggtaatcactatgtcacttaccagcaatggatctttactgtgatctgcccaataagagatttaggctcccataataaggatccagcttctttctatgacttttttctggcctaaagttggtttccacccttctccatcaaatatgaaatgtttcttagtactctctgcccagaagatgaaaggaagtatttatccatctgcccccatccccagttgttaaaaagtcatcctgttggcattaagtctcccacaactttggtttgcagatgcatgggtgctgagaggatttctgcaagagtcctattctaccatctcaaaggagcccagtgctggaaagaggaaggtactggaaagataaatactaaggagaggcactgtcagtgtgcacctgcatgaagctagtgaaaaactgtctagacctggtcaacttagtaatggctggatgaagaggtggggctgagaggatatcatgtggtacaggaaaagcctgatatactgacctcctttcaatttctcatacacaccaagctcattttcatttttggagcatcttatatgacaaattcaaaaagcgtcaaaaatatcataacaaggcagggagaatgttctagtttaaaagagactaaaaaagcgtagcaacagagttcatgaaacctgattgagtgatggattttaaaacagctataaaggacatgcttttgtacaattggggaaattaaaatagtatcgtaaattagaagttgattcttaggtggtggtagaatagaacttctatcagtcttgtggatctgaagatacagaaattgtacgttggtgcccgccaagtggaagagagagttaggctttcagttggaaccctgaaagggatataccccagagcggggttccccaactcacaagccacagaccaataacaatctgtgacctgataggaatggagccacacagcaggaggtgagcatcaggtaagcattaccccatgagtggccttatgacagatcagccaggcattagattctcataggagcacgaattagaatttcactaccagaattccacattacgggtgccacagtgtgtagttttattgcaaatagtagcatgactataacaattgccacaagagtggtgtagtaaaaaaaattatttaaaacttacttgcccaacgtaaaacatttccctttggggatttacagagttacaatagcagtttcatgtataattaaaatttcctgcaaatacgaattaaaaataagttttattatttggtggcaaattttgagagtaaagtgtggaaatgacaaatattatctgttgaagtaaatgtgggactgagtaagataagtagcctttagttacttaatttttgtgatttttagcttatgattttttatttttccacaactgatgttctggacaattctctgggctgttaggggttgctccctcagctttttaggctttgacttgaggtgatgtatttaggagttgattcctgtaacttttgcttctaagagcgttgaaataagaacaatgtagggcccttcccagcttggcttaaggaagaagagagaaagactaaatttcctgggttagatagaggtggttttatttctttggacttttctagttgtgttaatggcttgaggcttccttgcctctggcttagctggctgatcagctaatttatttcctttggctaccttatttattctcttttgatgttccctacaatgcatccctgctatttcgtgtgtaagaaaaagtaaggataataacctgttaatttcctggtgatattttatgggagattcattagtggtaagaaaatgcctttccttttaaatggcagcatgagcatggacaattaggaaagcatacttggagttagtataaatgttagctaccatttccttgcttaacttaagtgctcttgtaagagctattagctcagctaattgagtgcttgtgtttggggagagtgactactgcttatcctgtcttatgtacttcttgctttacaggctgtttattagctaagagctccccttagaggacagtgatcctgccacattatgtgggctgtaaacagttgaattatttcctagggttaacttggaggcttttctgactagtagagctaatatgacaatgacttggaagcacgtgtaaataggtctttctaactacaggtaaggtggagaaaactattggattcgagtttttcctgagatgccctttactgttgtgctatctttttttttaattattatactttaagttttagggtacatgtgcacaatgtgcaggttagttacatatgtatacatgtgccatgctggtgtgctgcacccattaactcgtcatttaacgttaggtatatctcctaatgctatccctcccgcctccccccaccccacaacagtccccagagtgtgatgttccccttcctgtgtccatgtgttctcattgttcaattcccatctacgagtgagaacatgcggtgtttggttttttgtccttctgatagtttactgagaatgatgatttccaatttcatccatgtccctacaaaggacacgaactcatcgctttttatggctgcatagtattccatggtgtatatgtgccacattttcttaatccagtctataattgttggacatttgggttagttccaagtctttgctattgtgaatagtgccgcaataaacatacgtgtgcatatgtctttatagcagcatgatttatagtcctttgggtatatacccagtaatgggatggctgggtcaaatggtatttctagttctagatccctgaggaatcgccacactgacttccacaatggttgaactagtttacagtcccaccaacagtgtaaaagtgttcctatttctccacatcctctccagcacctgttgtttcctgactttttaatgattgccattctaactggtgtgggatggtatctcattgtggttttgatttgcctttctctgatggccagtgatggtgagcattttttcatgtgtctctttggctgcataaatgtcttcttttgagaagtgtctgttcatgtcctttgcccaccttttgatggggttgtttgttttttccttgtaaatttgtttgagttcattgtagattctggatattagccctttgtcagatgagtaggttgcgaaaattttctcgcattctgtaggttgcctgttcactctgatggtagtttcttttgctgtgcagaagctctttagtttaattagatccatttgtcaattttggcttttgttgccattgcttttggtgttttagacatgaagtccttgcccatgcctatgtcctgaatggtaatgcctaggttttcttctagggtttttatggttttaggtctaacgtttaagtctttaatccgtcttgaattaatttttgtataaggtgtaaggaagggatccagtttcagcttcctacatatggctagccagttttcccagcaccatttattaaatagggaatcctttccccattgcttgtttttctcaggtttgtcaaagatcagatagttgtagatatgcggcgttatttctgagggctctgttctgttccattgatctatatctctattttggtaccagtaccatgctgttttggttactgtagccttgtagtatagtttgaagtcaggtagtgtgatgactccagctttgttcttttggcttaggactgacttggcgatgcgggctcttttttggttccatatgaacttgaaagtagttttttccaattctgtgaagaaagtcattggtagcttgatggggatggcattgaatctataaattaccttgggcagtatggccatttttgcaatattgattcttcctacccatgagcatgtttgtgctatcataaaggggaggtctggattagagagaagaaaagagagagatgggctctagtgtttaggaggaggtttactttcctacccttaatttccagaattatccagggctcctgtgctataagggcaatctgagcccctggagctaaggtttaagccctgggacccatcagtcctgctgaaccatctgtgagactggttttgaacccagtgacctctgcctctgggggcagttctgtttccagtggttttgccacagcccagacagggttgaggttgcttcatcttgctgcctgggcatttcttttaaaaatgccctggcctgccatgccaataggaactagcagatgcactttggggattctggactttacaagcttgtaaagctgctgctgaagcctctgttgttctcctgaaattttcccctttttgggggactcttcctggtacctattataaaagaaaaaagtcaccaccttcaggaggttctcttaggtgctacttcgtcctatagcttgtttttgtagttttcttttaatattgggaactacctgtgtaataaacttctttttcagaatgagctgttcctccactgaattagggaataaggaggtgtactctattagtgcctctcttggcctttccataaaggctacagaattcttatctggcttttggttcattatagagagtttcgagtaactgagaggtttggccctggtttttcataggtctcttaaaatgcgtttaaaaattggtttctttttcattcatttcctgagctattggggttttagttagggttatttaccagaactgctttcctccctattgggaatgatttttttttttggtttggtgttttttttttaagtgataaaaatattttatttaaatggtacagaagaaattatgtgtacttaaaaatgattaaaaattcatgttaggaaatgctaaaaacccaataatttacacaatgataaaatctaaaatgatgagaaaacatgaaatgctttcgtttggtcctctgacctaacaaaactattaagaacatgagatatagtaattactgaagttgggttaaaagcacaagacaacataattcctttatatacatccagccattttatacaagaaactgttataccttaaatggaagagtgaagaatttgtttaaaatattgagagtgcattatgcacctataatgaaaccactttctccaaagattcaaacagattaacattgcaaaatggtatttctatataacaccaacttctgaaaaatttaataattcatttaagaatatgcaagtgaaatgtagtttattctgatttcaacaacggatattcaaagtcacaatttttcccaagaaatcattcactttatactttcaaaaacacattgtagcttttctgttaccagtcagccatgttttcaactagctgcatgtttaatcattcacttcaaatttacatgtccagcccagcacagtggcgtgggcctgtagtcccaactacttcagaggctgaggcaggaggatcgcttgatcccaggagttcaaagccagcccagtcaacatagcaagaccctgtgtcttcagaaatcatccaaggagtgagataaacattacaacccacatatactgggtaaacaacaagggaatgaaaaatgacctcacatgccctaaagcaatgttgacgcaaactcctgatgcaataagggcagcagttgtaatgggtacctggaatggtatcgtggaattggagaacttatttttgtaatgaaaggaaagctagcttgaaagaaatgtttttgaggttttctcttgtttttctcctttttgtttggttcaggtttgaaatttagattggcttgggttaaatttgggtaggcaaaaaaatattatctttaagggaattaatatttatcaaatattctcttttttcatgtaaaccccaatgaatgatatgaaatttgaagaaataggagagagcaagaaccatagaatgaagtcagaaaaaccctgctcttctttaaaatagagaggctaattttaaaatgttgagtttaggacctggaatgcgaaacatctcaaattagcactttgaacgctttctcctcccaagcccgtcgcattcctttctttatcttcatgttaaggctgggtggaaggttcatcaattcccggatatgatccaaaatagacttagatttgtacctatgagaatcaatgatcttagcagtacgtgacttatatccaattctcagaacttaatgcttaccattgtaacattatgataataaaacactggcagatataaagtcatgtcatttattttagtcatattgaatctcttagaataaattatttattttttagaaaatatcttttagagtaaaatttacataaatcaaatgtattcctgttataattttaaatgaacatccatctacccccaatgctttaagtattagagagtagacttgacgtccatctaagactcctttcagctttacataaggtctcattactatgatgcattggatcctcttgttctctgttttcttcaggaaatcatgctcacagaggttaggtaaattggtcagggtaacacagtaatggctgcactacatttaaactgcagctttttaaatccatgtttaatactttttctcaacacctcccaattgcctcacattatttcagattcttctttgggaccccttgaattcaccctatgtagcacctcccttggcaaaaaaaaaaaaaagttaacaaaatatgctttcttaataggcaaaaagggggatgtatatttcttcaaataactaaaaaaggggagtccatatttattaagtgaaaagaacaagtgcaatcacattagcttgaaagggaaataagtgattacatgatatacttggactgttggacaggaacagataggggacttttccgtgagttatttattttggtcttttatttaaagcagccctaatttttagattgtttgaataacagacaaattagaagctcagcaaatttcttagtggacaattttaactttccaaaaaatatccttgcatttccgctaccttctttaaaaatgaaacctatccctcttcaggacactggtcccaagacagatcatctagaagtacccaaatacctccaaacagatcaggaccaattcaactatttctagaaaaaaaaaaaaacaaagtctgtgcttcatattggatgcccacaatatgttctccctgctcttctagattacttattttccttttttttattattattatactttaagttctagggtacatgtgcacaacgagcaggtttgttacataggcatacatgtgccatgttggttgcctgcacccattaactcatcattttcattaggtgtttctcttaatgctatccctcccccatccctccaccccatgacaggccccagtatgtgatgttccccggcctgtgtccaagtgctctcattgttcaatttgcacctatgggcgagaatatgcggtgtctagttttctttccttgtgatagtttgctcagaatcatggtttccagcttcatccatctccctgcaaaagacatgaactcatcattttttagggctgcatagcattccatgatgtatatgttccacattttcttaatccagtctatcattgatggacatttgggttggttccaagtctttgctattgtgaatagtgctgcaataaacatacatgtgcatgtgtctttatagtagcatgattaataatcctttccgtatatacccactaataggatcgctgcgtcaaatggtatttctagttctagatccttgaggaatcgccacactgtcttccacaatggttgaactagtttccactcccaccaacagtgtaaaagtgttcctatttctccacatcgtctccagcatctgttgtttcctgactttttaatgattgccattctaactggtgtgagatggtatctcattgtggttttgatttgcattcctctgatgaccagtgatgatgagcattttttcatgtgtctgttggctgcataaatgtcttttctgagaagtgtctgttcatatccattgcccactttttgatggggttgtttgattttttcttgtaaatttgtttaagttatttgtagattctggatattagccctgtgtcacaagggtagattgcaaaaattttctcccattctgtaggttgcctgttcactctgatggtagtttcttttgttattcagaagctctttagtttaattagatccatttgtcaattatggcttttgttgccattgcttttagtgttttagtcatgaagtccttgcccatgcctatatcctaaaaggtattgcctaggtcttcctctatggttttagatctaacatttaagtctttaatccatcttgaattaagttttgtgtaaggtgtaaggaagggatccagtttcagctttctatatatgactagtcagttttcccagcaccatttattaaatagggaatcctttccccatttcttgtttttgtcaggtttgtcaaagatcagatggttgtagatgtgtggtgttatttctgaggcctctgttctgttccattggtctatctctctgttttggtaccagtaccatgctgttttggttactgtagccttgtagtatactttgaagtcaggtagcatgatgcctccagctttgttcctttggcttaggaatgacttggtaatgcgggctcttttttggttccatatgaactttaaagtagttttttccaattctgtgaagaaagtcattggtagcttgatggggatggcatttaatctataaattaccttgggcagtatggccattttcatatttattcttcctatccatgagcattgaatgttcttccatttgtttgtgtcctcttttatttcattgagcagtggtttgcagtgctcagtaagttggattcctaggtattttattctctttgtaacaattgtgaatgggagttcacacgtggcttggatctctgtttttctgttattggtgtatgggaatgcttgtgatttttgcacattgattttgtatcctgagactttgctgaagttgcttatcagcttaaggagattttgggctgagtcgatggggatttctaaataaacaatcatgtcatctgcaaacagggacaatttgacttcctcttttcctaacttaataccctttatttctttgtcttgcctgattgccctggccagaacttccaatactatgttgaataggagtggtgagagagggcctctctgtcttgtgccagttttcaaagggaatgcttccagtttttgcccattcagtatgatattggctgtgggtttgtcataaatagcttttattatttgagatacgttccatcaatacctagtttattgagagtttttagcaggaagcactgtggaattctgtcaaaggccttttctgcatctattgagataatcatgtgatttttgtcactggttctctttatgtgatggattacgtttattgatgtgcatatgttgaaccagccgggcatcctagggatgaagccaacttgatcttggtggataagcttcttgatgtgctgctggatttggtttgccagtattttattgaggatttttgcatcaatgctcatcagggatattggtctaaaattctctttttttgttgtgtctctgccaggctttggtatcaggatgatgctggcctcataaaatgagttagggaggattccctctttttctattgattggaatagtttcagaaggaatggtaccagctcctctttgtacctctggtagaattcggctgtgactccatctggtcctggactttttttggttggtaggctattaattattgcctcaatttcagagcctattattggtctatacagagattcaaattctttctggtttagtcttggaggggtgtaagtatccaggaatttatccatttcttctagattttctagtttctttgcatagaggtatttacagtattctctgatggtagtttgtatttctgtgggatcggtggtaatatcccctttatcattttttattgcatctattttgttcttctcccttttattctttattagtcctgctagcggtctatcaattatgttgatcttttcaaaaaaccagctcctggattcattgattttttgaagggctttttgtgtctctatctccttcaattctgctctgatcttagttatttcttgccttcttctagcttttgaatttgtttgctctttcttctccagttcttttaattttgatgatagggggtcgattttaggtctttccagctttctcctgtgggcgtctaatgctataaatttccctctaaacactgctttagctgtgtcccagagattctggtatgtggtgtgtttgttctcattggtttcaaagaatttatttatttctgccgaattttgttatttacccagtagtcatttagttttacattttgaaacacccaaacaactgtcactggattgcttgcaacagaaaggataaatgctttatgggatggatgctgcattctccatgatgtgattatttgcatgcttgtatcatatcttatgttcctcataaatgtatacacctactatgtacccacaaaaaataaaaataaatgacaggcaaacgaccaatatgcacatgaaaagatacccaacatcatgagtcgttagggaaatgaaagtcaaaagtatcatgagataccacttcacattcattaggacggctattacttaaaaaatgaaaactgacaggtgtgaggatgtggataaactgcaacccttgaacattgctgtttggagtgtaagatggtgtgattgctgtggaaaatattatggcagttcctcagaaaggttactcatcataatatacatctctttagcaactgggatacattttttctatcaatggtttaaattcactggcaataaaactgaagagaaaaatgaagtaagagggagaaagaaacaagggagaaaggaaattcgaattcacttgacctttaaattctaatatatgttttaaggctgcttcctttcatcatgaacagagaacttgagtcctccacaccagttgaagaaaactgcattgtgactgaagtccaatcacctgtacctcacacagtctggaaataaggaacacacaaatcaagaactagacaagaaattcaactttctccacaaatcttcttgggaaagagtgtctctgaaaattttgatacccttggacactcagaaaagaaaagggtggagttagagcccagctgtgtgagaggcagatgggaactggcctcacctggcaaagccaagggaaccagtgtgagaccaggggggacacaagggctttctctacctccttccataggtcctgtttaggatcaagaccattgttctcccagaacctctataggcaaaaagaaggattaccttccgttgccaataatttccaccagaatcctcactatttttaccattgtacaaattaggaaaatgcacacattcttggtagattctgcacagtggagagaaagcttaaagagaggcatggaggctggactttacaacccctcaacctcactccatcatccttatctgtgcatttccctggtgacctctttttcctcctggtgcctcccccactgtcatttctgctgcatcacagacacagacttgcaagcaagtgtggttgtgactgagtctatttctgacaccttaccctttctcaccctgtggggaattcttgctgagagggctttggaatcaggaatgaagccagagggcagggctgacagggaccatttaaatgctgcaactcctagagattcacatggaagcctggacacaattcagaagagccaacccaaggaagcaaaaatgtcaccactacctgtgagttaaaaaggcacagccttcaataatctcaagtcacattaaagaaggtggaaaaagggagattttatgagaggaaaatatgagagtttctattgtgaatgttttactgagattggaggtgtgtggaagacagagaccctgggactatgatgtctgagatgtttgtggggtgtcaggtgtggcccatggaccagtgtaaccctctgtgagggtgtgatagtgtctgatgagagtcaactctgctgagatgatgttacgttaggtaaaaggtgtaaagcccaccaggatgggtgggacgtgcctgagtgtaagagggtgactgtgttttgtcttcctgtctgtgatgtgagtgtgtgtgagcacacccagaccaatgcatgagcatctttatatggacagtgagcaggcatgtgtgactcagtgagtggtgtggctctgtgtgactgtggtagtgtgtgtgatgggatgtgactaggtgttgaactgggaacatgcacgtggccttctgtccatgtgaagtttcctccttacacagcagggcctctgatgaagcagctgtgcatcttcccatgtgtgtcagtgtggatcccgggtggcagaactggtggggatcttggggactgggagttaccaatgactcatttgtgagcattaatgagagcagaatgtatgatctgtagatgtctcttcccaggcagagtggaaaagaggaatccagactatgggaacaatggtccctcaggtggggtctgcacatagtgaccatgatctcctgcctctcatcctcaggtcttttcctgtctcccacccaaggctgccattcccattgtaggtcaggagggtgtgcaagtcctggctctctgaggaagaacattggagactgtggttttagagactgaatcacctcaaactggaaaggaacaagggtagcctcagttcagatagagtttacagtggatattaatcatccaagtagctgggtttgctggctcatgtctataatcttaccattttgataggcaaaaatgggaaaataacttgaggccaggagtataagagcagcctgggcaaaatagtgagacaccgtctttacaaaaactttaagtgtcagacaggcaacttggtgggcattttttttttgagacggagtcactctgtcacctaggctggattgcaatggtgcaatcttttcttactgcaaccttcgcctcccgagttcaagtgattctcctgcctcagcctcctgagtacctgggattacaggtgcacaccaccacgcttggctaatttttgtatttttagtagagacgggatttcaccatgttggtcaggctggtctcgaactcctgacctcgtgatcgaccttccttggcctcccaaagtgctgggattacaggcatgagccactgcacccagccttggcgggcatctttcaccaaagctactcaggaagccaaggtgtgaggacccctgcagcacaggagttcaaggcttcagtgagctatgggtgcaccactacacatcagcctgggtgagagagtgagaccatgtctcagaaaggaagaaaaattatccacttgtaggttgtctctaattacttccctgacccgcactcttcatttgtccaagtgctgcagctgtgctctcaacaatttttacaacttctgggaaagatgcccatggcccttgacgatagtgatgcatgtgcatcccacacacaggggtttcctgttcttttgttatttccctctctctttcaacaagtgttgcttcttacggattgaatttctccactgatagatcctcaagtcttgttttcacagatattaatttctctatcactaagatcacccattagtaagaattactaataaagataaaaaataaaaagtaaagaaagtacagaaaaaaagaattttaaataatcttcctagtacctgggaaacagttaggcagagttcaggtatggatctaagatggcactgtcagtaagaggcagaatcaggactggagtccaggcagcctggctcctgaatcctagctcctaactatgagaccctcatgtctttaggaatatggagttctgactgtgatagggtgaaagagggaagtcctcacagtttgcctgttgatctctaattttctacatcatggtaatctgtcacaaaaggggaggccacacctggcccagcccctttcacccactctcaatcccctagcaggtgccacacagaaggcgtgtcctcgtccattggttcttgcatgacaatcagagggacacggatcctccctttcatgtgagtactgcatggcacaggggtggaaaagaagggagaatatttactcaggaggtggtctcatgtgagtgatgtggaaatttctagttggcaggatggaggaaccatgcaggcgcaggtcctggagaccctccagcaccaagcatgaaacctgcagtggctgaactgtgggccagtcatgaggtctaagggaggagaacactcaggggttagggctgtggctctttatcaaggggcacagaattttcagggaatggacaaggcatagacccaggtaagtgactgtggctcactttccatcttgtgaggggaagagaatctccccacctgggggatatacgaggagctaaagcagccccacagggaccaggcctgcagtatcaccagagagatcagggaggcttctttatgccttggggaaaagaaggaagggatttgtgtgtgtgttgagtgtgtgtcctacaagggaggggcctgcccaacactccgtgtgctttgccctcagcaatgacccagagctgcgggtggaattctacactgggatgaatgagaactcagacatcgccttccatttctgagtgcactttggccattgtttggtcattgacagccatgtgtgtggggcctggaagtgtgaggggagatgccacaatgtgttcttcaaggacggcaaacaatttgatctgagcatcttggtgctagacaatgaataccaggtgagtgccctaggagctcccggtatccagcctccatgggttctcagagcaggaggcagctctccctggcctgacccaaatagattttcaggacccatttctcataactactcttaccccaggctttttatcacagagcaccctctggttgcaccgctatcctcagctcgtttccaaaatctgaccgtgatcagtatcagctcatctggcatttcccccaaggtgaagaatctcctgtcttttctcactgtattcatttctacttatgttgctgtttaaattttcactttgctgaatgaatacaatattcataagaataaaattgttttagtcaatgaaaaattaaggctttgtctcactcctggacccaatcttattcctgagagcattaccagcgctctgctctccttccacaggaaatctttgcttatagaagcatatagatctacaatttcatttgtttttaagaaaatcctagtatacattgctccacacgttacaccttaaaaactgagttgatttgttgtgaaagaatatatcttgaagataccgtctattaatggtgcttcctcagtttttaaagaatgcataatattgcattataaggattacctaaaattattaatcttgactctttttaagggccttgaggttatttccaatattttgctctcactaatggtgctgtattaagacttctagtcaattcttttgttttatccacctcccttacttatattgaaagataatcataaagaaatgaaaaactggttcaaaaatgtgtgcattttaaatttaacaaattgacacctagaaggttactttatagactcagtaatgaagaatatatccaaatgttctggccctttcttatgagtagagcaaaagattcacattttattcagattcaagtgaaggatctctttctatgcttagaaaccgttcaaaatgatagcctatgttttgcaacacttgtccaattctacctctccaacaacacttgaattttattcttggccaccatcagcccagatctaggcaactccaaagagaaactgggccatcagtagggaatggcagtcagagttcatggaacagatatatatgcattcaatgaacataatccagtgttaatcctgtttgaacccctgtacaagatgcagggattcaagttcatgaaatacagtcactagccatggggattttccaagctagacgggaggctgagcaaacatagaccatgtgacacagagtggtacagccttgctggaggaaacagaggaaacactagaaataatgtgagcactctctcaaatagttaatctttaacaggattgtgagtcttgggttcagttatataactagcagttttctcaggggatgttgtaggtataggagagagtagagagaaggctgaaagtttgtttggtggcatactgtctttctgaggcacttttcctcttgtaggtaataataaatggccaacaccatacatctttgcccatccacttccaccatgttctatgaagattttgcaagtgtgggaagatgtctccctgacctcaatgtctgtctgcaatttatggagatgaccacacccctcattgttgaggaatccctctttccatgtgaccataggatccccagagcctgctaacagcatgatctctcctcacccttttccctacacttggtcattaaaacatcaccaaacttcccagaatttggttcttgctttaagggggaaagagaaagtggtaatccccaagaggccccgaggaactttatgggaagcatccagaaatcaaataggataaaccttcttgtgactccaggagtgaatgacaaggtccctgcaatatcttaggagacattaggtacagcatcctttgacagcatattgttgacatcagagactctgagacaaaatctttaccctatcttagatgactcactgcactgaaatgttaggtagatgtttacagccacacagatgtacctcgtggctttggggagaaattttgtaacttaagaacaatctagtggaatttcctaatactttccattattttcaggatatttattgtatgttaacacggtgcctggctctgtataggctgccatacaggagctttacaaaaagacacgtttctcacttgaaaatttcaatccaagcaacagttagagaatcacaggagtccaaagatttctcttaaagaaccccaattgtggaagatagtgtggcaattcctcacggatctagaactagaaataccatttgacccagcaatcccattactgggcatatacccaaaggattataaatcattctgcgataaagacacatgcacacatgtgtttcttgcggcactattcacaatagcaaagacttggaaccaacccaaaagtccatcaatgatagactggattatgaaaatgtggtacatacacaccatggaatactatgcagccataaaaaggatgagtttatgtcctttgcagggacatggatgaagctggaaaccatcattctcagcaaactatcagaagatcagaaaacaaaacaccacatgttctcactcataagtgggagctgaacaatgagaacacatggacacagggaggggaacgtcgcacactggggcctgtttgggggtagggggctaggggagggataacattaggagaaatccctaatgtaggtgacaggttgatgggtgcagcaaaccaccatggcacatgtatatctatgtaacaaaactgcacgttctgcacatgtaacccagaactaaagtataatttttcttaaaactaaaaaataataataataattgtgagatttttccaaagtatgtggcagaatcctgggatttctatttaaaaacaagtggtcatggttttagatcagaaaatatgtagtttatttttgggatggacacaattcatacacatggacacagtgagctgaccttgctttgctgctctttcattaggcattgcagcacagcaaagctcccaacacacgttggcttacagaaatcatttactctgatctttcttggttaactggactcatgtgggtagtagatcatgtggtgagagtcatgttttctgaagcgtcttttagtttgggattccagaagatgcttcactcatgtctgactcaacacgagggctgggtgagcacctacgggctggctgattatctccttccctacgtcacttccctattcatgccttgaattccctcaaatcataagagtctcatggttcttggacttaaggaatgatgattggctgccaccaaagaaagccttccaaaaggctcaaggagaaggtgaaaggcatcataggacctggctttgaaaggcagacagtgtcacttctatgacattatattgatcaaagtgagccatacacaagcccaaatcaaagggaggggggtttcataagatgtggttattttgacatgcagtcatgagggagcatccttggcaactatttccactcagtcctcactggcttacatttttcccatatatcaaaagcactaatcctgtaaggaaccactgaaggcaatacacttataggaacaggctcagattgtagtccagaatgttatcatccaatcaggatctggtgtccatgaagtgactagaaattatcatgtgcactttctttcaacatctgcactaaagaaatacattatctgccctatacatattaaacctacaagactaaaacagatataggaaaatgcagtgaacacacttattttagagggacaaaagataataaacagcaccctgaaagcaagatgggtcaccaacaactctactggagccacccacaaaaaaatcagccagggttctcacccttgttgcatctgctcaaaccagcatctccttatctgaaaatattgtcttgatatgtgccgcttctgtttccacaagtacttaaaggatataggtctcattaagttggactaagtgatgctccttgaattaataagcaagacatccactcagtgaaagaaaccatgctaactctttgtacatgaataaaaattaaaataaagaaaccaatacaaacaaacaagaacaaaaaaaaaataggcatccatcactggtccacatcttgctgaagccaactatacccgtattttcatcttctctgaaaacgtttctctgcaacagttggctccaccttctactgtcagcttcttagagctcctaccaagtaggcacaatgacagcccttttccctctataagagctgttgtcatctggttcatagcacaaatagagaaccatttaggagaagataaacaacatattacctaaaagccaaacaatgcagactgaagagggtctcatcaaatagcctctttgtctgcagggcctatcacaggtgtcaatttgatcatcttcatcctctctttccatgttcattgccacaacttgttcagctccaaccttactcatgggtatgcctctctccttgccctcctttaacctaatattcatataccttgaggtgtcaatgcacagtaaatgacaccttcatgcctctctttcttgttgctttcctgtatgaactgaaattccctccgctgtcactggaaagtctcaggttcttgttaggtacactttcccccttatatcatccctctcacagttttggtcaccgccctattttgatgatggatcataggccccctcatcagcatggaaatcatttcttggggaattaggcaatacttgctctgagtggataaaaactatcttggaccccatgagtttctgagcagaacatgagattgatttcatatctacatgtcgctggacgatgcccattgtatttgcatgacctacagtgtcctacatgctgcccctgctatacaaacacacagtgactgccttttcttgactgatattcaccagttcagttcagctcatataggccatttgttactctcatctttataccaactactaccctatgctcatggtggccaggagtgatgtctcagataaaaagagaagacatagagccaaggaaccaatgttgaacaaacgatttttgtttgcctctggagacttactcaacatctctttcatgcttgtcaacccaagttcatggccttctcccagcaaatacatcattgctgaaaacacagtaggttatttccgcagtctaaagccttaccttttgaaaggtctgtagggctttccagtttttgctgaaagcccccaaagaataaatctactctttgctaacgttgtccttgatgtccaagtctcccaaagctgtttcttctgtggtgctgtccgtggtgctgagctctggtgcgtctgggcctgtatttgcaagtgaggggccaataagacagaattaacagagaaattttttgttttgtatttgataaatcacagctcaaaatatgtatgatgaacggagcaggaattgaatttggactttcagatcacaatttctgcagtgccctctctcaccgtcctattcaacatagtgttggaagtcctggccagagcaatcaggcaagagaaagaaagaaagggcatccaaacagaaagagaggtcaaaccatccctgtttgcagatgtcatgattctgtatctagaaaacatcatagtctctgcccaaataattcttaagctggtaaacaacttgagcaaaatttcaggatacaaaatcaaagtgcaaaaattactagaactcctatataccaacaacagcaaagcatagggccaaatcaggactgcaattccattcacaattgccataaaaagaataaaatacctaggaatacagctaaccaggaggtgtaagatttttaccatgaaaattacaaaacactgcttaaaatatcagagatgacccaaacaaatggaaaaacatcccaggctcatagatagcaagagtcattatcattaaaacagccatattgcccaaagaaatgtacagattcaatgctatttctgttgaactacctatgacatccttcatagaattagaaaaaaactattttaaaatactcatggaaccaagaacgagttgaataaccaagacagttcttagcaaaaagaatcaagctggaaacatcatattacccaatgtcaaactgtgttacagggccacagtaacaaaacagtatggtactggtacaaaaacagacacagagaccagtgggacagaagagagagcccagaaataaggtcacacacctacaaccatcatcagacccttccactaagctgaccaaacaagcaatgtaaaaaggatttcttattcaagaaatggttctgggtaactggctaaccatatgcagatgattgaaactgaaccccttcatcacattatatagaaaaatcaacacaagatgggttaaagacttaaatgtaaatgcaaaactataaaaaccttggaagactacataggcaataccattctgaatgtagaaatggacaaaagttttatgacaaagatgcgaaaagcaacctcaagaaaagcaaaaattgacagtggatttatttaagctaaagagcttctgcacagcaacagaaactatcaacagagtcaacagacaatctacagaatgggagaaaatatttgaaaattatgtatctgaaaaaggtcttatatctagcatctataaggaacttcagtaactttgcaagaaaagaacaaacaactccattaaaaagtgggcaaaggggcaggacgcggtggctcacgccataatcccagcactttggaaggctcaggagggccgatcacgaggtcagaaaataacttgagaccagtctgcccaacatggtggtctcagacacctagaccaatggaacagaatggagaacccagaaatgaggccacacaccgacaaccatctgatcttcaacaaagctgaccaaacaagcaacggaaaaaagactccctactcaagaaattgtgctgggagaactggctagccatatgcaaaagattgaaactgaagcccttccttaaaccatatacaaaaatcaattcaagatggattaaagacttaaatgtaaaatccaaaactacaaacaccctggaagacaacctaggcaataccatgcaggacataggcatgagcaaaggtttcatgatgaagatttcaaaggcaatcacaacaaaagcaaaaattgtcaaactgaatctaattaaactaaagtgcttctgcacagcaaaagaaactatcaagagagtaaacagacagcctatagaatgggagaatatattttcaaactatttatctgaagaagatctaatatccgagtatctacaagaaacttcaacaactttacaagaaagaaaaaacaaacccataaaaaagtgggtaaagggcttggcacagtggcttatgcctgtaattccagcacgttggacagccaaggctggtggatggcttgagcccaggaatttgagaacaggctgggtaacgtggcaaaaacccatctctactaaaattagaaaaaattagcctggcatggtgacatgagcctgtattcccaactactcaggaggctgagctgggaggatcacctgagcccagaagccagaggttgcagtgagctgagacagtgccacaccactccagcctttttgtcagagtgagacctgttttaaaacaatgaaaaaaggtgagcataggacaggaacagacacttttcaaaagtagacatacaggtggccaacaagcatataataaaagcttgacatcactgaacattagagaaaagcaaaccaaaaccaaaatgagataccatcccacaccagtcagaatggctcttattaaagtcaaaaaaggacagatgctgacaaggttatgaagataagggagcacttacacattgttggtggaagtgtaaattagttcacacattgtggaaagcagcgtggtgattcatcaaacagctaacaacagaactacccttcaacccagcaatcccatcactgggtgtatacccagaagaatagaaatcattctgccataaagacatatgcacatgaatgttcattgcaaaactatgcacaatagcaaagacatggaatgaacccaaatgcccatcaaggacagattaaatacagaaaatgtggtacatgtacacaatggaatactatgcagtcctataaaacagtgagattatgtcttttgccataacatggatggagctagaagccattattctcagcagactaatgcaggaacagaaaaccaaatactgcatgttctcacttataagtgtgaactaaatgatgagactcatggaaccaagaggggaacaacacacactggggcctacttgagggttgagggtgagaggtgcaataggagcaaaaaaataactattgggtattatgcttagtacccagatgaagaaatcataattaccacaaaacccatgacacaattttatctgcatgtgtaccactgaacctaaaataaaaggaaaaataaatcaaagaaaaaaacaaatctcaattctgttccaagatggctgaataggaacagctctggtctgcagctcccagtgtgatcaacgcagaagacagtgatttctacatttccaactgaggtacctggttcatctcattgggactggttggacagtgggtgcaggccaaggagggcgagctgaagacctgggaagtgcaaggggtcgggagattaccctttcctagcaaaggcaaaccatgacagactgtacctggaaaatttggacacaaccaaccaaatagtgtgcttttccagtggtcttagcaaatggcaccccaggagattacatcttgcacctggcttggcaggtcccatgcccacgaagctttgctcactgctagcgcagcagtctgagattgacctgggaggcagcagcctggcaggggaggggtgtccgccattgctgaggcttgagtaggtaaacaaagtggccagggaagctcaaactgggtggagcccaccacagctctgcaaggcctgctgcctctgtagactccatctctgggggcagggcatagctgaacacaaggcagcagaaacttctgcagacttaatcatccctgtctgacagctgtgaagagagcagtggctctcccaacgtggtgtttgaggtctgagaatggacagactacctcctcaagtgggtccctgacccccgtttagcctaactaggagacacctcccagtaggggccgactgacacctcatacaggtgggtgccccttgggacaaagcttccaaaggaaggatcaggcagcaatatttgctattttgcaatatttgctgttctgcagcctccactggtgatacccaggcaaataagagtggacctccagcaaactccaacagatctgccgctgagggacctgactgttagaaggaaaactaacaaacagaaaggaatagcatcaacatcaacaaaaaggaaatcctcaccaaaaccccatctgtaggtcaccagcatcaaagaccaaaggtagataaaaccacaaagatggggagaagccagagcagaaaagctgaaaattctaaaaaccagagtgcatcttctcctccaaaggatcacagctccttgccagcaccggaacaaagctagatggagaatgactttcatgagctgacagagctaggcttcagaaggtcagtaataacaaacttctccgagctaaaagaggatatttgaacccattgcaaggaagctaaaaatcttgaaaaaagattagatgaatggctagctagaataaacagtgtacagaagaccttaaatgacctgatggagctgaaaaccatgacacgagaaatacgtgatgcatgcacaagcttcaatagccaattcgaccaagcggaagaaagggtatcagtgatcgaagatcaaattagtgaaataaagcaggaagtgaagtttagagaaaaaagagtaaaaagaaatgaacaaagcctccaagaaatatgggactatgtgaaaagaccaaatctacgtttgattggtgtacctgaaagtggcggggagaatggaaccaagttggaaaacactctgcaggatattatccaggagaacttccccaacctagcaaggcaagccaacattcaaattcaggaaatacagagaacaccacaaagatactcctcgagaagagcaaccccaagacacataattgccagattcaccaaggttgaaatgaaggaaaaaatgttcagggcagccagagagaaaggtcaggttacccacaaagggaagcccatcagactaacagcggatctcttggcagaaaccctacaagctagaagagagtgggggccaatattcaacattcttaaagaaaagaattttcaacccagaatttcatatccagccaaactaagcttcataagtgaaggagaaataaaatcctttacagacaagcaaatgctgagagattttgtcaccaccaagcctgccttacaagagctcctgaaggaagcactaaacatggaaagaaacaactggtaacagccactgcaaaaacatgccaaattgtaaagacaatcaatgctaggaagaaactgcatcaactaacaggcaaaataatcagctaacatcataatgacaggatcaaattcacacataacaatattaaccttaaatgtaaatgagctaaatgctccaattaaaagacacagactggcaaattggataaaaagtcaagacccatgagtgtgctgtattcaggcaacccatctcacgttcagagacacacataggctcaaaataaagggatggaggaagatctaccaagcaaatggaacacagaaaaaaaagcaggggtggcaatcctagtatctgataaaacagactttaaatgaacaaatatcaaaagagacaaagaaggccattacacactggtaaagggatcaattcaacaagaagagctaactatcctaaatatatatgcacgcaatacaggagcacccagattcataaagcaagtccttagagacctacaaagagacttagactcccacaccaaaataatgggagactttaacaccccactgtcaatattagacaggtcactgagacagaaggttaacaaggatatccaggacttgaactcagctctggaccaagcagacttaatagacatctacagaactctccaccccaaatcaacagaatatacatttctcagcatcacatcgctcttattccaaaattgaccacatagttggaagtaaagcactactcagcaaatgtaaaagaacagaaatcacaacaaactgtctctcagaccacagtgcaatcaaattagaactcaggattaagaaactcactcaaaaccgcacaactacatggaaactgaacaacctgctcctgaatgactactgggtacataacgaaatgaaggcagaaataaagatgttctttgaaaccaatgagaacaaagacacaacataccagaatctctgggacacatttaaagcagtgtgtagagggaaatttataccactaaatgcccacgaaatttctttgtggaaagatctaaaattgacatcctaacatcacaattaaaagaactagagaaggaagagcaaacaaattcaaaagctagcagaagataagaaataactaagatcagggcagaactgaaggagatagagacacataaagaaccaacaaaaaatcaatgaatccaggagcttgttttttgaaaaagatcaacaaaattgatagaccgctagccagactaaaaaagaagagagaagaatcaaatagatgcaataaaaaatgataaagaggatatcaccaccgatcccacagaaatacaaactaccatcagagaatactataaacacctctacgcaaataacctagaaaatctagaagaaatggataaattcctggatacatacaccctcccaagactaaaccaggaagttgaatctctgaatagacaagtaacaggctctgaaattgaggcaatgattaatagcctagcaacaaaaacaagtccaggaccagatggattcacagctgaattctaccagaggtaaaaagaggagctggtaccattccttctgaaactattccaatcaatagaaaaagagggaatcctccctaactcgttttatgaggccagcatcatccaaataccaaagcctggcagagacacaacaaaaaaagagaattttagagcaatatccctgatgaacattgatgcaaaaatcctcaataaaatattggcaaaccaaatctggcagcacatcaaaaatcttatccaccacgatgaagtcagcttcatacatggggtgcaagtcttgttcaacatactcaaatcaataaacaaaatccatcacataaacagaaccagtgacaaaaactacatgattatctcaatagatgcagaaaaggcctttgacaaaattcaacagcccttcatgctgaaaactctcaataaactaggtattgatggaatgtatctcaaaataatgagagctatttatgacaaaccgacagccaatatcatactgaattggcaaaagctgaaagtattccctttgaaaactgacacaagacagggatgccctctctcaccactcctattcaacatggtgttggaagttctggccagggcaatcaggcaagagaaagcaataaagggtattcaattaggaaaagaggaagtcaaattgtccctgtttgcagatgacatgattgtatacttagaaaaccccatcatctcagcccaaaatctccgtaagctgatgtgacttcagcaaagtctcaggatacaaaatcaatgtgcaaaagtcacaagcattcccatacaccaataacagacaaacagagagccaaatcatgagcgaactcccattcacaattgcttcaaagagaataaaaaacctaggaatcaaacttacaagggatgtgagggaccctttcaaggagaactacaaaccattgctcaatgaaataaaagaggatacaaacaaatggaagaacattccatgatcacggataggaagaatcaatatcgtgaaaatggccatacttcccaaggtaatttatagattcaacgccattcccaacaagctaccaatgaccttcttcacagaattggatgctacctgacttcaaagtacaccacaaggctacagtaaccaaaacagcatgatactggtaccaaaacagatatatagaccaatggaacagaatggagccctcagaaataacaccacacatctataaccatctgatctttgataaacctgacaaaaacaagaaatgaggaaaggattccctatttaataaatggtgctgggaaaactggctagccatatgtagaaagctgaaattggaccccttccttacaccttatacaaaaattaattcaagatggattaaagacttaaatgttagacctaaaaccatgaaaaccctagaagaaaacctaggcaatatcatttaggatgtaggcataggcaaggacttcatgactaaaacaccaaaagcaatggcaacaaaagccaaaattgacaaatggatctaattaaactaaagagcttctgcacagcaaaagaaactaccgtcagagtgaataggcaacctacagtatgggagaaaatttttgcaatctacccatttgacaaagggctaatatccagaatctacaaagaacttaaacaaatttacaagaaaaaaacaaacaaccccatcaaaaagtgggcaaaggatatgaacagacacttctcaaaagaagacatttatgcagccaacaaacacaggaaaaaatgcttatcatcactggtcattagagaaatgcaaatcaaaactacattgagataccatctcacaccagttagaatggcgatcattaaaaagtcaggaaacaacagatgctggggaggatatggagaaataggaacgcttttacactgttggtgggagtgtaaacgagctcaaccattatggaagacagtgtggccattcctccaggatctagaactagaaatatcatttgacccagcatcccattactgggtatatacccaaaggattataaatcatgctactataaagacacatgcacacgtatgtttattgcagcactgttcacaatagcaaagacttggaaccaaaccaaatccttcaatgatagactgaattaagaaaatgtggcacatatacaccatggaattctatgcagccataaaaaaggatgagttcatgtcctttgcagggagatggatgaagctggaaaccatcattctgaacaaactatcactagcacagaaaaccaaataccgcatgttctcactcataggtgggaattgtacaatgagagcacttggacacatggcagggaacatcacacatgggggactatcatggggtggggggcagggggatggatagcatcaggataaataatgtaaatgacgagttaatgggtgcagcaaacaaacatggcacatgtatacctgtgtaacaaacctgcacattgtgcacatgtaccctggaacttaaagtataataataattttttttaaatctcacctttctcccagaatctgcagaagaaacagtctccctcaaactttgatttacatggacaccaacagagggtgtagctagagcccaagtgtgtgacagtcagatgaaagtggcccttacctagcaaagccaagtggcttagtgtggggcaggttcatgcaagaaatttctctacttctctctgcagatcctcctcaggatcaaggtcagtgctctcccagaacatttaaaggcagagagaagaattaccttttagggctaacttgtttcccccaaaatctccaactttttttttcttgtttagccattgtacaaaattgggaaaatgtacaccttctgggtagattctgcatagtggagaaaaggcttgagaggcacaaaggctgggctttacaatcactacccctcactccatcatccttatctatgcatttccctggtaacccaatccacagtctggtaccttccccaatgtcatttctgctgcattacagacacagacttgcaaatagttatggttgtgactgagtttcttcgtgacacctgaccctttctcatgctgcaaggaaagcttgctgggaggagcatggaatctggaatgatgccagagggcaaagctgaaaggggtcatttaagtgctgcaactcagagattcactcagaagactggacacaattccgaaggtcgcccagaaggagaggacaatgtcatttctaactgtgagttgaaaaggcacagccttcaataatctcaagtcacacaaaaccaagaaagatgtggggtattttatgagatgaaaatatgagcattcctactgtgaatgctttactgagagttgtgggtgtgtggaagagaaacactgaggctgggtatctgagatgcttgtagcatgtgggttgtggatcctggacaaatgtaaccctctgtgagcatgaggtggtatctgatgagagtgaactctgatgagatgatgtgactttaggtgggaggtggatggcacaccaggtcaagcaggtgtttgtgtgagtgtaaggggggtgattgtactttgtcttcctctttgtgatgtgagtgtgtgttagcacagccagaccagtgcatggtcatctttatgtgcgcagtgagcaggtgtgtgtaactcagtgagtggcatggctctgtgtgactgtgggtgtgtgtgctgggatgtgactgagtattgaagggaaaacacgcatgtggccttctgtgcatgtgaaggttcctccccacacaacagcacttctgatgaaggaactgtgtgtcttttcatgtgtggcaatgtggatcccaggtggcttaactggtagggatcttggagattgtgagttaccaaggacttgtttcagatcacttatgagagcagaatgtatgatcagtagatgtctcttcccagtaagagtggggaagaggaatggagactatgggggtgatggatcctcaggtggggtctgcacagagtgaccactgtctcttgcctcccaggctcagcttccctgtccccagcctatcctgtccttttcattgtgggacaggaggtttgctagagaaggatattagaggccatggtttcagagactgaatcacgtaaaatatccactgtaagctatgtctcaactgagtctaaacttgttcctccacccatgaaggaacaagtctagtctcagttcagacagagcttacagtggatattaatcaacaaagcagctgggttcactggctcacggctataatcccaccaatctgagagacaaagatgagaggataacttgaggccagaagtttgaggccagtctgggtatcatagtgagaccctttctttaaaaaactttaaatatcagactgccagagtggcaggcaccttttgccccagctacacaagagggggcagatgtgtgaggatcactgcagcccaggagttcaacgtttcaatgagctatgatcgcaccactgcatgtcagcctgggcaacagagcaagaccctatctcaaaaatacagaaaaatcatcaaccacttgtagtcattgtagaaatcaatcattccctccagttatgtccctgacccacaggcttcacttgtgcaagtactggggctgtgctgtcagtaatgtgtgccacttcttggaaggacgtccattgcccttgatgattgtgagagttgaaaataaggcagatcagtgtttcaggaggactcccctgttctgttaggtcacccctaacaggccctacacatgccagggattagggtaaaagttttacatgtattaactgctctattatggagaacttcctacacagtaggaattcatgataatcctccttgttttagggaaactgaggaagtcaagtaaccgatctaagattgcactgctagtaagaggcagaatgaggactggaatccaggcttcttggctcctgaacccttgctcttacctatgggtccaccataccttcaggaatgtggggccctgactgtggtagagtgaatggggagagtccacagagcctgccctgtgatctctaacctcctgcaccatgggaatatgttacaggaagggagactgcacctgaccctgcacctctcacttattctcaataccctggcaggtgccatacaaactgcctgtgtctttgtctgttggttcctgcgtgataatcaaagggacactgatcgactcttctatgtgagtactccatggtccaatggagggggtggaggagaaaggagaatatttgctaagagtttgaccttatgtgtgggtgatgtggaaatgtctaattggcaggatggaggccccatgcaggtgcaggtcctggagaccctccagcaccaggcatgagacctgcagcaactgcatgtgggccagccatggggcctaggggaggagaatactcagtgggttgggactgtggctctttatcaaggggcatagaattttcagggaatgaacaagtcacaggcccaggtcagtgactgtgattcagttttcatctggggatgaggggcacagcatctccctgcagggggcacgaggagctgaagcatccccacagggaccaggcctgcagtatcatcagagagaattttaccctgggtaaatgggggaagggatttgtgtgcgtgtcaagtgtgtgtctgtgcaatgaaggaacctgtccaatatgctgtgtgctttgccctcagcaacgaaccacagctgcaggtggatttctacactgagatgaatgaggactcagaaattgccttccatttgcgagtgcacttaggccgtcgtgtggtcatgaacagtcgtgagtttgggatatggatgttggaggagaatttacactatgtgccctttgaggatggcaaaccatttgacttgcgcatctacgtgtgtcacaatgagtatgaggtgagcaccccaggagctcgcagtacccaggctctttgggatcccagagcaggagtcagctctcattgacctggcctcaccagtccctcagggcccatctcccgtaactacccctgccccaggttttcatcacagagcaccctctgcttgcactgccgtcctcagctctttcccaaatctgaccaaggtcaaggtcggctcatcttccatttcccccaaagtggagaatctcctctgtcttttcacatagtgctcatttctacttatgccattatttaaattttcatgtagctgaatgaatacaatatacttaagaagaaagttttttctatcaatcaaaaattatgtcttcgtctcacttttgggccccaattctactcatacgaataacattaccagagctctgctctccttcagagagaatcctttttctttttttttttttttgagacagagactcactttgtcatccaggttggagggcagtgacgtgatctcagctcactgcaacctccacctcccagattcaagcgattctcttgccttagcctcccaagtagatgggattacaggctgatttttttatttttagtagagacggggtttcaccatgttggccaggctggtcttgaactcccagcctcaagttatcaacccaattcagccttccaatatagtggattacacgcatatgccaccgtgccaaccccttcagaggaaatctttgcctatggaagcatatagatatgtctatgatttcatttgtttttaagtaaatcctggtatgttgctctacacattatgctttaggaactaagttggtttttcatcaaagaatatatcttgaagacattatcaatccatgtttctgcttcaattgtttatttgggcattgaagttgtttccagtattttgctctcacaaatgatgctgtattaagctttcaaataaatccttttgtcattaccaacctcccaatacttacattgcgatataattacaaaaaatgaaaaaactggttgaaaaatatgtgcattttaaatttgaaaaattaatactaataaggtgactctctatacagcctcaatataaggaatacatccatactttcttactttctctaacgagtaggccaaaagattcacatcttattcagattcaagtgagggatcttttcctatgcttagaagttgtcgaagataatatcctatgttatacaagacctgtcctcctttaactctctaagaacactgggtttcattctttgccattaacacctcagatgtaggctactccaaagaggaactgtgccatcagtagtgaaagacagtcacagttcatggaactgaaaagtatgcatttcagtgaacatggtctcgcactaaccctgtggcaggtcctgtgcgagatgcagggtctcaagttcctgagacacagttgctggtaatggggttgtccaggttagaagggaggctgaataaacagggactgtgtgacacagagtgtagaacttcactagataagaggaaacattagaaataaggtcagcaactgtctcaaataggcacaaaatgtcatctgtaaacagaagtgtatctacaacattcgcttgtataactaggagttttcttggggaatgttattggtactagggcagagtagagaagaggctgaaaacttgttgggtggcatactgtctttctgatgcatttttcctcttaaaggtaaaggtaaatggtgaatacatttatgcctttgtccatcgaatcccgccatcatatgtgaagatgattcaagtgtggagagatgtctccctggactcagtgcttgtcaacaatggacggagatgatcacactcctcattgttgaggaaaccctctttctacctgaccatgggattcctagagcctgctaacagaataatccctcctcaaccccttcccctacacttggtcattaaaacagcaccaaaccgtacatgatttggttcttgctttaagagggggaaagaggacgtgatcatccccaaaaggggccagggcattctatgggaggcatcaagaaatcaaaggggataaaccttcctgtgacaaagggagtgagtgacaaggtccatggaatgtctgataagacattaggaacagcatccttctatagtacgtagttgacgtcagacagtctgaaccaaaatacttacccaatctcagatgactcacggcacttaaatgttagatagctacttacagccacacaggtgtacctagtagctttggggaaaacctataactttaggaaaattatgtggaatttcttaatttttccattgttctcaggatgcttattgtgtaggaacactatgcctggctttgtgcaggctgctgtgaaggaagtgaagaaaaggatgacaagttttgcatgtaaagttttcaatccaagcaatagagaatcactggagcccagtgattccccttaaagaataccaattattcttattttcaaatatttgaaaagtttttcattttatgtggggagaatccaggggtttctctttagaaataaatggtcatggttttagatcagagaacacgtagattattattggaatagacacaattcatgtccatggacacagtgagcagatcctgctttgctgctattcttgcgataaattgcagcatagaaaactgcccaacacatattggctaaaagcaatcatttattttgatctctcccagctttacaggtttactgaattcatgtgagtggtaggtcatgtgatgggagtcacgttatttgagagatcttttaggctgggatttcaagggatgctttactcttgtccaattcaacactagggctgagtgaacacctggaaactggctgattatttccttcactacctcaccttcccattcatgcctttaatttcctcaaatagactctcacagttcttagacttaatgaatggtgactggctttcaccaaggtaagccttccaaaaggctcatggagaaggtgcacagcatcacaggacctacctttgaatggcagacagtgtcacttctatgactttacattgatcaagatgagtcacacagacagccctaatcaaaaggagaggactccacaagctgtggttattgtgactgtagtcatgaggggccatccttggcaactagttccactcagaactacttcccatataccaaaaacacaccctgtaaggaatctctgaaggcatacaattataggaacaggcctcagagtaaagtgcagtgtcttatctaatcaggatatggtgtctatgatgtgactacaacttatcacttgcaatctctctcaacatgtgcatcaaaggaacacattatctgctttatacaaatcaagcaaagaagactgaaggagacaggaaaaaaggcaatgaaaacacctattttagaggggcaaaataaaatagacagcagtcactaatctgtatcattggtgaaaccaaccagacacctattttcattttctctgggaatgtttctccgtagcacttgccctcaccctccattctcagcttcttggagttcctaccaagatggcagaataacagccctttccctatgcctggccaacatgttgaaaccacatctctactaaaaatacaaaaattagctgagcatggtggcaggcacctgtaatcccagctacttgggaggttgaggcaggagaatcacttgaacccaggagaaggtgcttgcagtgagctaagattatgccattgcactccagcctgggtgacaagagctaaactccatctcaaaacaaaacaaaaagaaatctaaatataattgagttgaatatttgaattttttattgacatttcaaattagattataattcaatttaaaagagcatctcatagaagcagatgtactcaattatgttaacgctgtggtttcatgtaagcaatttgttttgtgaagggacacaaatccaaccagattttaacagtgtataaatatgtatgtattaatttaattacaatgacaatactctcaactccccatttgaataaaggagagcatctgatctctgttctggggcaccgtgcactataggtgtgtggaaatacagatgccctcagctgtggggtaggctcagtgggacctggagtgctggagcccctgggccattcacctctggctacaaaagtcattgtctatttatccccagctgctatagaaatattattttcagtggctgtcatgatgcaaaagaaaagaagcatggagatttattaaacctttacatataagttatgttagtaaataaagtgaactttcttctggcttaactaaaaaatctatagtagtatttatgccttttggaaaatagagatggcaatttaaatattatgaagcaaagcaactgattatcaggtaagacaaccaactacaactgcagaattgtagaggttatgggttaaatgtataagaatatttcatagcaataatcttttaagactatgcaagagactccacagtggagtagaaattagaacagaattaataatactgtgtatgctctcagttcaccaatttatcaaaactagctttatgatgcaggagggtgtctgcccttttgcaattggaagaaaagaaagaatatttcatttttcgactctttagattttcttcactaacagtatttccacagctaagtaagggatttgcaagtagcatcaagagaaaaaagcaggcttgagcagcttttaaaatatggtcttaaaatatggaaattggagccatgtgtggtggctcacacttgtaatcccagcactttgggagcctgaggtgggaggattgcttgaggtcaaaagtttgagaccagcctaggcagcatagcaagatccccatcgttacaaaaaataataattttttaaaaaatcagctggatgtggtggtgcatgccttagagtcctagttacttgggcggctgaggtaggaggagctcttgagcccaagagttcaagtctgcagtgagctacaattgcaccactgtactctagcctgggaaacaaagtgagactctctctctctctctctctctctctctctctctctctctctctatatatatatatatatatatatatatatatatatacacatacacacacacacacacatacatacatatatatgtatgtatatatacacatatatatgtatgtatatatacacatatatatgtatgtatatatacacatatatatgtatgtatatatacacatatatatgtatgtatatatatacatacatatacatacatatatatgtggaaaagggaaggggccaagaatgtcaaagacattattaaagaaaaggaaagatttctcctgccaaatatcagaagttttataaagctacagcaattaagatagtgtggtcttcattgataaactgaccaatgaaacagaatagagagctcccaaacaaatctccacaaatttaatatttgatatgtgatgcaggtgacatggcagatcagcaaagaaagaaaggacttttcaatacataggaaagaaaaataatggttactgatataggaaacaaaatgaaattatattccttcttcgctctatatacaaacattaaattccagatggaccaaagacttatgtgtcagaaacaaaactttaaaacttttagtagaaaatgtaagtgaatgagacacaaaaagccatttaaccattaaaaaagattagatgttttgactatcacaaaattgagaactttttacatcaaaaagtgaaaagataagctgggcatggtgtctcaagcctgtaatcccaacagtagatcacctgaggtcaggagtttgacaccaggctggccaacatggtgaaaccctgtctccactgaaaatataagaaattagccaggcattggtggcagacactagcaatcccagctacttgggaagctgatgcacgagaatcttctgaacccgggaggtggaggttacagtgagccactgcactccagcctgaatggcagagtgagactctgtctcaaaaaaaaagtaaaaattaaaaaataaaagtaaaaaagtgaaaagataaactataaactagaagaagatatttgcagtacctaaaacctatgaaagattaatatcaaatcaacaaagtataaggagttcctatgaattaattttaaaaatagcatcccaaaagaaaattgggaaaagacattaatagggatttcacaaaagagaatgcccccaaaacataaaaattttctcatcctcattagtaatcaagaaaatgcacaagatactacatatctattcgctccacaaatattaagaagtttgacaataccaaatgtattagtcgacattcacgctgctgataaagacataactgagactgggaagaaaaagaggcttaatggatttatggttccacatggccaaggaggcctcagagtcatagcagtggatgaaaggcacttcttacatggcagtggcaagagaatatgagaaggaagcaaaagacgaaacccctgataaacccatcagatcctgtgagacttattcactataacaagaatagcatgggaaagaccagcccaagggattcaactacctccccctgggtccctcccttaacacatgggaattctgagagatacaattgaagctgagatgtgggtaggtacatagccaaaccatattaatctgctcctggcccctccaaatctcatgtcctcacatttcaaaacctatcatgccttcccaacagtcccccaaagtcttaactcatttcagcattaacccaaatgtctgctgtccaaagtctcatctgataaaaggcaagtctcttctgcctatgagcctgtaaaatccaaagcaagctagttacttcctagatacaatgggggtacaggtaattgagtaaatacagctgttccaaatgggagaaattggccaaaacaaaggggttacaggccccatgcaagtcctaaatccagccaggtagtcaaattttaaagccccaaaatgatctcctttgactccatgtttcacatcaaggtcatgctgatgcaagaggtggactcccatggccttgtgtagttctgcccctgtagctttgcagggtatagcccacctcctggctgttttcatgggctgatgttgagtgtctgaagcttttccaggctcatggtgcaaggtatctggggtctggaggacagtgtccctcttctcacagctccactaggaagtgctccagtagggactctgtgtaggggctctgatccttccacatttcccttccacatggccctagcagaggttctccatgagagccccacccctgtagcaaacttctgcttggacatccaggcgttttcatacatcctctgaaatctaggtggaggtttccaaatctcaattcttgacttctgtgcagttgcaggctcaacaccaggtggaagctgccaaggcttggtgcttgcactctcaaagccatggcctgagttctatgttggcccctttcagccatggctggagtggctgaaacacagagcaccaaggccctaggctacacacagcacagtgatcctgggcccggcccacaaaaccattttttccttgtaggcctctgggcctgtgatgggaggggctgctgtgatgatctctgacatgccctgtagacactttccccattgtcttggggattaacattcagcttctcactacttatgtgaatttcttcaggcagcttgaatttatcctcagaaaatggcattttcttttctatcacattgtcaggctgcaaattttccaaacttgtatgctctgcttcctttataaaactgaatgtctttaacatcatctgagtctcctcttgaatactttactgcttagaaatttcttccaccagataccctgaatcatctctctcaagttcagtgttccacagatctctagggcaggggcaaaatgctgccactctttttgctaaaacataatgagagtcacctttgctcctgttcccaacaagttcctcatctccgtctgagaccaccttagcctggaccttattgttcataacactatcagcattttgtcaatgccattcaacaagtctctatgaggttccaaattttcccacattttccagtcttcttctgagtcctccaaactgttccaacctctgcctgttaccaagtttcaaagtcgcttccacatttttgggtatcttttcagcagcaccccacttcactggtaccatattactgtattagtccattttcacactgctgataaagacaaattcaagtctgagaagaaaaaggggtttaattggatttacggttccacatggtgtgggaggcttcagagtcacggcaggaggcaaaaggcacttcttatatggcagcagcaagagaaaatgaggaggaagccaaagcagaaacccctgataaacccatcagatctcatgagacttattcactatcatgagaatagcacaggaaagactggcccccatgattcagtgacctcaccctgggtccctcccacaacatgtgggaattctgggagatagaattcaagctgaggtttggttggggatacagccaaaccatatcaacaaatatggagagactgtggatcaacaagatcatctcgaattaatacaggaggtgagagtttaaattagaacaaccactttggaaaataatttggattatcttataaaaatgagcattcttccaggagctggttttttgaaaggatcaacaaaattgatagaccgctagcaagactaataaagaagaaaagagagaagaatcaaatagacgcaataaaaaatgataaaggagatatcaccaccgatcccatagaaatacaaactgccatcagagaatactacaaacacctctactcaaatgaactagaaaatctagaagaaatggataaattcctcgacacatacaccctcccaagactaaaacaggaagaagttgaatctctgtatagaccaataacaggctctgaaattgaggcaataatcaatagcttaccaaccaaaaaaagtccaggaccagatggattcacagctgaattctaccagaggtacaaggaggaactggtaccattccttctgaaattattccaatcaatagaaaaagagggaatcctcccaaactcattttatgaggccagcatcatcctgataccaaagcctggcagagacacaaccaaaaaagagaattttagaccaatatccttgatgaacattgatgcaaaaatcctcaataaaatactgacaaaccgaatccagcagcacatcaaaaagcttatccaccatgatcaagtgggcttcatccctgggatgtaaggctggttcaatatatgcaaatcaataaatgtaatccagcatataaacagaaccaaagactaaaaccacatgattatctcaatagaagcagaaaaggcctttgacaaaattcaacaacccttcatgctaaaaactctcaataaattaggtattgatgggatgtatctcaaagtaataagagctatctatgacaaacccacagccaatatcatactgaatgggcaaaaactgaaagcattccctttgaaaactggcacaagacagggatgccctctctcaccactcctattcaacatagtgttggaagttctggccagggcaattaggcaggagaaggaaataaagggtattcaattaggaaaagaggaagtcaaattgtccctctttgcagatgacatgatagtatatctagaaaaccccattgtctcagcccaaaatctccttaagctgataagcaacttcagcaaagtctcaggatacaaaatcaatgtacaaaaatcacaagcattcttatacaccaataacagacaaacagagagccaaatcatgagtgaactcccattcatgattgcttcaaagagaataaaatacctaggaatccaacttacaagggacgtgaaggacctcttcaaggagaactacaaaccactgctcaatgaaataaaagaggatacaaacaaatggaagaacattccatgctcatgggtaggaagaatcaatatcgtgaaaatggccatactgcccaaggtaatttacagattcaatgccatccccatcaagctaccaatgactttcttcacagaattggaaaaaactactttcaagttcatatggaaccaaaagagagcccgcatcgccaagtcaatcctaagccaaaagaataaagctgaaggcatcatgctacctgacttcaaactatactacaaggctacagtaaccaaaacagcataatactggtaccaaaacagcataatactggtaccaaaacagagatatagatcaatggaacagaacagagccctcagaaataacgccacatatctacaactatctgatctttgacaaacctgagaaaaacaagcaatggggaaaggattccctatttaataaatggtgctggggaaattggctagccatatgtagaaagctgaaactggatcccttccttacaccttaaacaaaaattaattcaagatggattaaagacttaaacgttagacctaaaaccataaaaaccctagaagaaaacctaggcattaccattcaggacataggcatgggcaaggacttcatgtctaaaacaccaaaagcaatggcaacaaaagccaaaattgacaaatggatctaattaaactaaagagcttctgcacagcaaaagaaactaccgtcagagtgaacaggcaacctacaaaatgggagaaaatttttgcaacctactcatctgacaaagggctaatatccagaatctacaatgaactccaacaaatttacaagaaaaaaacaaacaaccccatcaaaaagtgggcaaaggacatgaacagacacttctcaaaagaagacatttatgcagccaaaaaacacatgaaaaaatgctcaccatcactggccatcagagaaatgcaaatcaaaaccacaatgagataccatcttataccagttagaatggcaatcattaaaaagtcaggaaacaacaggtgctggagaggatgtggagaaataggaacacttttacactgttggtgggactgtaaactagttcaaccattgtggaagtcagtgtggcaattcctcagagatctagaactagaaataccatttgacccaaccatcccattactgggtatatacccaaaggactataaatcatgctgctataaagacacatgcacacgtatgtttattgtggcactattcacaatagcaaagacttgtaaccaagccaaatgtccaacgttgatagactggattaagaaaatgtggcacatatacaccatggagtactatgcagccataaaaaatgatgagttcatgtcctttgtagggacatggatgaaattggaaatcatcattctcagtaaactatcgcaagaacaaaaaaccaaacactgcatattctcactcataggtgggaattgaacaatgagaacacatggacacaggaaggggaacatcacactctggggactgttgtggggtgggggaaggggggagggatagctttaggagatatacctaatgctaaatgatgagttaatgggtgcagcacaccagcatggcacatgtatacatatgtaactaacctgcacattgtgcacatgtaccctaaaacttaaagtataataataattttttaaaaaagaaaatgacataagaaaaaaaaaaaagaaaaaacagataaagtgcactttgtctgtatttacagcccataatcaagaaatcattgcccaatctcatgtcatgatgatatctgcctgtcattatcatttctcctatcattatcattgaaggtcttacgtttactcattgatacattttgagttcactattgtatatgttataagctaagggaccagtatgtgtaagtccagttttcccagcatcacgtgttgagaagtctgtccttttccaatgcgatggtcgtagcccattgtggactctcaggtgaccctctgtgagtgtttctaggctctctattctactcctttgatttctatgcctctccttaagccagcaccacactgtcatgatattatagctttttaaagaggtcaaacattggccacaataaaatatgcacttccaaagccatttttaggtattatatatcatggattaggctctttttttttattctcaggacctacatggacactatttctcatccttgtgatacaggagttattaagaaataatttttaggtagatagtaagggtaaaagttcttggtggaaattttcctgtaataagaaacaacccccaaaccatctcttttctaacagaaaaggtggcttgaagggccaggagagcaagctttgatatgcaaatactgggtcattagaaacgaggttcactcaatgtggtgattcctgccatcttttccttgtcaccaggtgtaccaagtgtcatggccactttcagataacaccatgtgttcgaaacatcatggcaacccgcatttgcatattaaagggctaagatgggagggccagatttttcacaggctacagaaattacacacctggtcaaaccaatcccctgggccctatggaaaccagaagccgcctcctccagcatcccaatataagcaatcacttttccaccacacatggtttttatgtgtgtgtgtgtgataggtttttatttattattatactttaagttctagggtacatgtgcacaacgtgcaggtttgttacatatgtatacatgtgccatgttggtgtgctgcacccattaactcgtcatttacattaggtatttctcttaatgctttccctccccccatcattctgagcaaactatcgcagggacagaaaaccaaacaccgcatgttctcactcgtaggtgggaattgaacaatgagaacacttggacacagggtggggagcatggggggttttttgttcgaatccccctctctctgtctctgtacgggggagctgttttcttccttccttctttcttgcctatgaaacttttcaccccttaaaaccactccacatgtgtccatgttgttaatcttatcagcacgagaccaaggaccctggttccctccagtcatcggagccatatcttttaggtgcattggccaggaatgggaattcattcatcagactggtgagtatggagcaaatctcaactttaaatctgtcttttaatctctaggctctcttccagctatcctgccaccaaactttctttctctctctacccgcggtctcttactgtctctctcactgtgtctaatgtgcaggaatctttacagttcagggaaacaggtctgttagagaagatcatgaatcaaggcaggcagtaactcaataaacgtctgtctctctaaggtttcgctggtgagcacatggtatttctaagccaaaaccgccacctggtggaaataaaaatcctcttcatgagacacttggttctctgtggtacgttgcagcttcacaatttctccattttgcacttttttactgctacttctgtggacgggaaactctggtttcaaccattaggagtaagatgtcttccacagccagattttagtcccaatattgtcccatcagtaggaaaactgccattcggttcctacactcttttaaggcacctattctgtctccaattaagacagtacttaattggtaaggggatattaagtttagaagttaaccagaacagttttttttaaagggtaaatgcattagcacgggtcataatagcaggcaatctagcacattgcctccattaaaggagccttgcccagaggtgacacagtctccccggagatccgttttcagggagccaggcaaactgcacatgtttaggaaatcaaaggtaaatcacacaaggcagataagctaagactgcatgggtaagcacgggtagccccatcacttagttcatccagctctatggcttggaggaccacacctacagccatgggtggcacatttaacatggtgccgggatccagaaaccagggaggggaagtaatcagaggatgctccctgtctgctcctccactctgggtcataccaaaaggaaggagactaagaagatgctttgtattctttcttctttttctaaatggataataaattatctttaggttgcacccctctggagtgcactctgaaacactgaaacttccttaatctcaaaactgtaaagagaaaagcaatttattttcttttgcacaaggacatggcatttttactaaatgggagggaagcggttctcataaacaaccctaactaaaacttcaatagctcaggaaatgataggaaaaggaagtactttttaatactcactataaaaggcctagaggaaaccagggccaaacctctcagttactctaagctgtctataatgaaccaaaagccagataataattctgtagcctttatggaaaggccaagagaggcactaatagagtacatctccttatcccctaattcaatggaggaacagctcattttgaaggagaagtttattacaaaagcagctcctgatattaaaactaaaaaagcaagcttaggacaaaataccaccttagagaacctcctgcaagtggcgactttggtcttttataatagggacaaggaggagtcccaacaaaagcgggggaatctcaagagaaggacagaggctccagcagcagctttgcaagcttgtaaagtccagaatccccaaggtacatccactagttgctattggcatggcagcccagagcatttttaaaaggaatgcccaggcagcaagatgaagcaaactcaaccctatccaggctgtggcaaaaaccactggaaacagaactacccccagaggcagaggtcactgggttcaaaatcagcctcacagatggtccagcaggaatgatgggtccaagggctccaacattggctccagtgactcaaactgccatagagcacaggagtcctagaggattctggaaatttacaaaaggaaagtaaacctccttctaagcactagagccagtctctctcttttctcctctctaatccaggcctccgctcttctcatagcacaactgtaaagggcatctcgggaaaaactctaatccaatatttttttcaaccttagctgtagttagaaagacctatttacacgtgcttccaagtcattgtcataatagctctactagtcaaaaaagcctccaagttaaccctaggaaataattcaactgtttacagcccacataatgtggcaggatcactgacctctaaggggagctcttagctagtaaacagccagtaaagcaagaagtacataaggcaggatgagcagtagtcactgccccaaacacaagcactcaattagctgagctaatagctcttacaagagcacttaaattaagccagagaaagatagctaacatttctactaactccaagtatgctttcctaattgtccatgctcatgctgctatttaaaaggaaaggcattttcttaccactaatgaatctcccataaaatatcaccaggaaattaataggttattatcctcagtttttcttccacaagaaatagcaggatgcattgtagggaacatcaaaagaaaataaataaggtaagcaaaggaaataaattaactggtcagccagctaagacagaggcaaggaagtctcagggcattaacacaactagtgaaagcccaagtccaggaactaaaaccatctttatttaatccaggaaatttagtattagtgaaaaatctcatctctctccttccctaagccaagctgggaagggccctccactgttcttctttcaaccctctcagtagtaaaatttacaggaatcaactcctgaatacatcacactaaagtcaaagcttaaaaagctgggggagcaacccctaacagtccagagaaacatccagaatgtccatgtggaaaagcagaaaatgttaagctaaaaatcacaaaaattaagtaactgagtaaggtctacccatcttactcagtcccacatttacctcaacatatacttgttgtcatttctgccctttcctgtcaaaatttgccaccaaatattaaaacttctttttaatgtataattgcagaaaattttaatgataaatgaaattgcacttggaactccgtaaatccccaaagggaaatgttatatcttgacaagtaaagttttaaacaaatgttttttactatcccactcttgtgggaattgttatagttatgctactatttgtgataaaactatacactgtggcacccacaatgtggaattctggttgtaaaattctaattcgtgctcctatgagaatctaatgctggggcttatctgacaggaggccactcacgcagtaatgcttacccactgctcacctcctgctttgtggcttctttcctaacaggccacggattgttactgctctatggcttgagggttggggacccctgctctagggtgtatctctttcagggttccaactaaaagcctaactctctctcccacttggcagacaacaacctataatttttgtatcttcagatccacaagactgatagaagttctactctgccaccacctaagaatcaacttctaatttatgatactattttaatttccccaattgtacaaaagcatgtcctttatagctgttttaaaatccattatccaatcaggtttcatgcactttggtgctatacttctttggtctcttttaatctagaacattctccctgccttgttatgacattttttgatgctttttgaatttttgtcatatataaggctccaaaaatgaaaatgagcttggtggtatgaggaattgaaaagaggtcagtatatcaggcatttcttgcaccacgtgttatcctctcagccccacctcttcatccagccattgctaaggtgaccaggtccagacagttgttcactagcttcatgcaggtacacactgacagtgcctctccttagtatctatctttccagtaccttcctctttccagcactgggcttctttgagatggtagaataggacttttgcagaaatcctctcagcacccatgcatttgcaaaccaaagttgtgggagacttaatgccaacaggatgactttttaacaactggggatgggggcagatggataaatacttcctttcatcttctgggcagagagtactaagaaacatttcttatttggtcggggtgagggtgaaaaccaagcttatgccagaaaaagtcatagaaagcagctggaccctcatactgggaacctaaatctcttattgggcagatcactgtaaagatccattgctggtaagtgaagtagtgattacccatggcatactaagtatcacaattactaagtattgcttggtattacaattacgagttcacaatgactaagcatagtcgcctgtgtgttcttggcaggaagtgctgagagaaggtgaagcactggactccagaagctgtggcactagaatggtaggggtacaatgggaatcataggattctggaagtatttggtttggttttaactgcattggaattatttttacaaaaagaaagaaagagctgggctcagtggctcacgcctgtaatcccaggctgaggctggtggatcatgaggtcaggagttcaagaccagcctgatcaacatggcaaaaccctatttctactaaaaatacagaaattggctgggcgcagtggctcatgcctgtaatcccagcactttgggaggccgaggtgggcggatcacgaggtcaggagatcgagaccatcctggctaacacagtgaaaccctgtctctattaaaaatacaaaaaattagctgggtgtggtggcaggtgcttgtagtcccagctacttgggaggctgagggaggagaatggcatgaacccaggaggcagaggttgcagtgagccaagatcacaccactgcactccagcctgagtgacagagtgagactgtgtctcaaaaaaaaaaataataatacagaaattagccaggcatggtggcaggtgcccgtagtcccagctactcaagaggctgaagcaggagaatcgcttgagctcaggaggaggtggaggttgcagtgagtcaaggtcacaccacttaatccagcctgggcaacagagcgagaatccatctaaaaaaaaaaaaaaaaaagaatgaatgaatgaatgaaaaaaggagagggacttattcatgctcaccaactaccaattaaaggcacactttgaacactagatgttcctgatgatagcatttaaagaaaccctcacatcctgcaagcacagggaagagagtgctgagtgctgaaacccatatgtaggatctaatttctaaaaacatggcataactgcaaaggaaactggtggcatggtcttaacaaatgccagattacaaagtgaatgctctgatagttggataactcagcttcctaatatcataacttgctttaaaaaactacagtaatcaaaatgcattcataccagcttaaagataagcctatagaccagtggaacagaattgagagtcaaaataaatctaaacatccatcgtaagttgatttccacaagggtgccaagatcattcaatgtgggaacaaattgtctcctgaataaatggtttttggtttttgtggggttttttgtttgtttgtttttaacttttattttaagttcaggagtacatgtgcaggatgtgcaggcttgttatacacgtaaacctgtcatggaggttttttgtactgaatatccacatgtaaaagaatgaatctggaccctcaccttatactatatacagaaattaactcaaaatggatcaacaacccaaatttaagagataaaactgccaaatatgggccaggcatggtggctcacacctttaatcccagcactctgggaggccgaggagggtggatcacgaggtcaggttcctggctaacacggtgaaaccccgtctttactaaaaatacaaaaaattagcggggcatggtggcgggtgcctgtagtcccagctactcgggaggctgaggcaggagaatggcgtgaacccaggaggcagagcttgcagtgagccgagatcacaccactgcactccagcctgggcaacagagcaagactccatctaaaaaacgccacccttgtatcttaaagtccctcatgactgtactactctgtgcaggccctccaagaatgcggtgttgcttttgctttcctatttttgtaggtggaagcagctctaatggcttccattgccctttcctactatcacattcctccctgcacaggtcagacaaccaatgtgggattctgccatttgctgagtgtgtccattccacttctgcaacctgacactgagcaaataagcagaggatggatgtggggccaactgggcagtgccaggtgcttccagtgctttcactttcacataattccagctgaacttggaaccgacttaaaaacaggatttgattcccctttcacttctacttatgaagacatcaatagatttccaggaaatcccacgtggagaggaaactgattttgtaattcactgcttgagtctgatgcatactctctagttagtatttcagacacaaatcacaggaacaatatttgctgcttgaggaaacagctatgaagacactgagagtagatacagagtgtcttgcctgccctaggtgaactggcaggaaataagaatctctgtgtccctggttgctttaggaaagtagaaacctatagagactaggagaactttctataggtgtgagaaagtgtgtgaggaaaagaggaggatagtggacagcatagagatttctggactgagacgggatttcgggcgtgaataactgagtgagtagcagcgtggaaggggctgtgtctgagctgagcagggctgagtgggaactgcgctctctacactgaaacagagtagggacctcatgggggctcccttcccctatttggactccaaagtgcacaggtgcctccgctcgaccaggaaaaagaagagggaaattcatatgctctctgccctcagttcaggaatgggggatgaaccatcccatttctggaaatgttgagacccagacttagcaaaggctaatttgttgatttaaagagtgctcatagatgaccatgcccttctaccatcctcctttctgacttagaatgggaaaagtcatgtcatagaggaggagctgtgggctcaaatagtggacaaggcagtcagtactttgcagagtgtcaatcttggtcagagatggatgcaaggcaaaccctttgaccagggcacacaatgacatggcttcatgagaagcatggaggctgaagtgcacaacttcccaccctcactccatcatcctcatctgtgccttccctggcgattccctgccccttggtgtgaccctccgtgtcgtttctgctgcagcacagtcacaggcctgaaaactgaaactgagtctatttctgccacccctactcacgctgctgagaaatcttcctggcaggggttcagagaaagaaataaagccagagggcagggccaagagggactatttaagtgctgcaaatcagagactcacacagaagaccagatactattctgaagaactacacagagggagacaacaatgtcatcactaaaagtaagtcaaaagacacagcctttaataaactcaattcacataaaccaagaaagaatcaggggtgatttcacaagacgaaagtatgagagtttctcttgtgaacactttactgagagttgtgggtgtgtgaaagagaaaccgtgcggctatgatatctgagatgctggtggagtgtggggtgtggactctgaaccagtgtaaccgtctgtgagtgcatggtggtgtctgatgagagtaacctctgctgagatgatgtgactttaggtgggaggtgaacagcccaccagggtgggcgggtgtgtgcctgagtgtaagggtgtaactgcgttttgtcttcttgactgtgatgtgagtgtgtgtgtgagcacagctggaccagtgtgtgagcatctttatatgcacagtgagcaggtgtgtgagactcagtgagtggcatggctctgtgagactatgggtgagtgtgtgctgggatgtgactgggtgttgaactgggagcatgcaaggggccttctgtgcatgtaaagtttcctcccaacacagcagcgcctctgatgaagcagctgggcacttcccatgtgtcagtgtgtgtcccatgtgtgaacagtgtgggtggcagaactggtgcgcctgttgtgagccatgagttatggaggagtcatctctgagcagaatgcgtgaatcctcaggtgcctcctcccaagcagagtggggaaaaggaacacagactatggggccgatggttcctcaggtggggtctgtccagaaaggccatctgctcctgcctccagcctcaggtctctctgtctcccagcctgtccatcccattgtgggagaagagggtgagcagatcctggctcactagggaaggcctttgggggatgtgggttcggagactgagtcgcccaaaatagagaaggaatcagtttattcttagttcatacagagcttacagtgcatattaatcaataacttgccagggtttgtggctcatgcctgtgatcccagtggtttgggaggccaaggtggaaggatcgcttaaggtgaggagtttcagaccagcctgggcaacgtagtgagaccctgtctgtacccagaatttaaagattatccaagcatgttggtgtgcaccttcattcacaactactcaggaggttttggcaggcggatcacttgagtccaggagtttgaggccacagtgagctgtgaccatgccactgcaatccaggctgggcaacagagtaagatcctgtatcaaaaagaccccaaaccccaacaccaaacagagaaatgaaaatcaaacaatatttagattacctccaatgacttccctggcccacactcttcatgtgtgcaggtactggggctgtgctgccagcaaggtgtccccttctggaaaggacgtccatggcccttgatgattgtgatgcacacgggggtttccagttcttttagcatttctctctctctttcaacaagtgttgtttctcactggagtgaatctctctactcttacatcctcacatcttgttttcacagcttcagtgttgaaaataatcacaggtcggtgttccagaagcaacctccctgttctaatgggtaacccccaacaggcttcatgcatggcagagattagggcaaaactttcacatatattaattcatatattactggaaaaaccctacaaagcagaaatttctgcttatcctccttgtcctggggaaactgaggcagggagcgttcaagtaatggatctaagattgcactgctagtaagaggcagaatgaggactggaaccaaggcagcatggatcctgaaccattgctctcatgtatgggtcactaatttcttcaggaatatgccgccctgaccgctacggtgggagggaggaggctcacagtttgccctttgacctctagcctcctgcaccataggaatctgttacgggggggaggccacacctggtcctgcccctcccacccactttcaatcccctggcaggtaccacacacacggcctgtgtccttgtctactggttcttgtgtgataatcacagggacaccgatcatccctttcgtgtgagtactccatggtccatggcagggggaggagacgaaagaacatttgctaaagggctgacctcctgtgtgagtgatgtgaaaatgtctagttggcaggatggcagcaccatgcaggtgcaggtcctggagaccctgcaacacctggcatgaaacctgcagtggccgcactgtgagctagtcatggggcctaggggaggaggacactcagggcattgggactgtggctctttatcaagaggcatagaatgttcaggaaattgacaactcataggcctaggtcagtgactgtggctgagtttacatcttgggatgagggagctcttaagggcaggaggggctgaagcagccccacagggacaagactggcagtatcaccaggaaggcctgtgtctgctctggggaaaggggggaagggatttgtgtgtgtccagtgtgtgccccacaagggagagacctgcccaacacaccgtgtgctttaccctcagcatggacccacagctgcaggtggatttccataccgagatgaaggaagactcagacatcgccttccatttccgagtgtactttggtcattgggtggtcatgaacagccgcgtgaatggggcttggcagtatgaggtgacatgccacaatatgccctttcaggatggtaaaccatttaacctgtgcatctccgtgctggccgatgagtaccaggtgagccccccaggagctcccagcacccaccctccatgggctcccagaacaggaggcagctcttcctgagctgaccccaccagttcctcggagccgatctcccataactactcctgccccaggcttttcctcacagagcactctctgcttgcactgccatcctcagttcttcttccagatctgacccagggtcaaggtgggctcacctgccattttccccaaggtggagaatcttgtctgtcttcacccatagttctcattcccatgtatgctgttacttacatagtcattcagccaaatggataaaacatgcatatgaataaggttattttatcagtccaaaatgtagtctttctctcagtactgaaccccaatcctacccccagaacagcagtattactagcttctctacacaaattccagagctaatgtatgcttatggaagcatacagatgtgtggtttcatttctttttaaaccaatgctgttttaagtttctctacacattacactttagaaactggggtggatttgttgtcaaacgctacatgttggagcaatcatccatccatggtgccgcctcagtttttcaacatcatacaatattcctgtagcagggttacccaaaattattgaacttgatccttttgatggacattaggctggttccagtattttgcgctcacaaataaagctttttaacgtaccctttgtcataatgaacctcccaatttccatattggagggtaattacaaaaaatggaataactccttcaaaattgtgtgcattttaaatttcataacttaacacctaaaaggtgactgtctctatagctttagtaataaataaatagtatttccaaactttctaaccttttcttcttcttcttcttctttttttttctggagatggagtctagctctgtcgcccaggctggagtgcagtggcacgatctcagctaactgtaacctccacctcccaggttcaagcgattctcctgcctcagcctcctaagtagctgggaatacaggtgcacacccaccacgcctggctaattttttttttgtagttttagtagagacggggtttcaccatattggtcaggctggtcttgacctcctgaccttgtgatccatctgccttggcctcccaaagtgctgagattacaggcatgagccactgcgcctggccttcttcccaatcttttcaaatgggcagatgcaaagagtaacatttcgtccatatttaagtaggagatccttttcttatgcctttcagccgttcagaataatatcctacgttttgcaacacctgttttgttcctcctctctgaaaacatttgaatttccttctttgccaccaccattacatctctgggcaactccaaggagaaactgggccatcagcagtcatagtgaatgggagttatagttcatggaactgaaatgtatgcattcaatgaacactgtccagcactaaccccatggcaggccctgtgcaagacgcaaggattgaagttcatgagagacagtcccaggccatagggatcttccaggtgagaggagaggctgagcaaacaggttctgtgatacacagggtggtaaaacctccttggaggaatgagaggaagcattggaaataaatgagcaactgtctgaagtaggcacaagggtaatctgcagagagaagtgtgtctactgggttctgatgtataattaggggatttctggttggatgctgtaggcactagggctgagtgagatgatgctgaaaacttgtttgatggcatattgtatttctgatgcatttttttcttttgtaggtaatggtaaatggccaaaatgcttacagctttccccaccgactcccaccatcttatgtgaagatggtgcaagtgtggagagatgtctccctgacctcagtgtctgtctgtaattgatgaaatgatcacattcctcatggttaaagaatccctgtttctgtgcgaccatggcatttccagagcctgctaacagaacgatcactcctcaccccttcctctacacttggtcattaaaacttcaccaaattttccagaatctggttcttactttcatggagaaaaagacaaagtggcacaaggacacaagtgacacaaggccactgtgatgtctgagattacataacgaagacatccttttatgtcagcccgtactttacgtcagacactctgaaccaaaattcctccttcattgtagatgactcactccagtgaaatgttgggtagctgtttacaacctcacaggcataattgattttggggagaagctttgtaatttgaggaaagtcatatgaaatgtcttcattcttgcactcattctaaggatgtttcctgtgtcttaatactgtgtctggcgttgtgcaggaagcactgaaaaagccgaggaaatactgaccaagtttgcacctgaaattttgttttgttgttgttctttgagacaagttcttgctctgtcattcaggctggactgcagtggcaccattaaggctcactgcagcctcgacaccctgggctcaaaaattcctcctgcctcagccccccaagtaggtgagaccacaggtgagcaccaccatggccagctaatttctgcatgttttttttgtagagatggggttttgccatgttgcccaggctggtgtcgaactcctgaagtcaagcaatccagcaacctcggcccaccaaattgctggcattacaagtgtgagcccctgtgcttggcctatacctgaaaatttcaatccaagccatagttagagaaccacaagagttcaataatttccctcaaaaaatccctttgtcatgttcaaaagaactgccagatttttctattttatgtgggcagaatcctggatctcctctttggaaataaatggtcatagttttagatcggaaaatatgtcatttattggtggaatgaacacaattcattcacatggacacagtgagccgaccctgctttgctgctgctaccgttggcattgcagaaccggaaacctccccaacacatattcacataaagcaaccatttattctgatgtctccctgctttgcaggtttactggactcatgcgggtggtagacacgcatgtgtgtgggagtcacgttttctgaaggacctacaggctgggatcccagaggattcttcacttatgtttgactcaacactaagggtgagtgaacacctgggggctggctggttgtctccttccctacctcccctacacattagtgtcttgaattttctgaaatcatgaaggcctcatagttgttggacttaatcaatgattactgtcttccaccaaagaaggactttcaagaaaccaaagaagaagctgccaggcatcatagaacttagctttgaaaattggagagtgtcacttttctatgacattatattgattaaggtgagtacagacagcccaaatcatggggaggggcctccacaggttgtggttgttttgattattggtcatgatggggtcctttttggaaccaagttccactgagtctccactggcttacagactgttcacataccaagagaagtaaccctggaaacaactccagaaagcaataccattgtaggaagaggctcagagtgaagtcccgcatcttatcatccaatcaggacctggtgtccatgaggtgactacacattgtcaggtgcactttctctcaatgtgtgcactaaggagacaaattattggcccttaacacatcaaacacccaatactgaaacacacataggaaaaatgcaattcacacacctgatttaagcattatttgaaaaagaaaagaaaaagaattttacatcaaaaggacaagaagatttttaaaaggagaatgaattgaagagaggaagaagaaaatagacagcagtcactgggccacatcattgctgaagccagccagacacctatttatcattttctctaggactggttctcagcaacaatcggcttcaccctccactcttcccttcttggagtttctaccaagatggcagaatgacagtccttttccctctataagagctgagatcacctgcttcatagcaaacctggagaaccacttagcagaaacaacatgttacctacaaactaatgaaggcagattgagtaaagtcctgtcaaatagcctctttttccacacggcccaagtcaggcatcattttgatcatcctcatcctctctccccatgttcattgccgcagtttgttcacctccaaccttactcatgggtatgctcctctcctacccgcattcaacctaacacccagatacctgaggtgccaacacacagccagtgctactcctcattcctttcttccacgtttcattcccatatggaatgaaattccctcctctctcactggacactcttgggttcagtttaggtccactctcctccttacacctttctgctctcagtgttgttcacttttctattttgataataggtcataggcctcatcacctgtatggaattcattttttgtggaattttagaaggtgacactgaccttatcaggggctcaccttcagcctagcacctaaatgtgcagaggcaagtggacaaaaaggaactgggaatagagtccaggcttcactcagtacctctttgtagtgacagcagaaagagtagtatgggtggtgggtgtgagatgttgtgtcacgggaacggagaacaggaagtgtttcctgggcactgagaagtgtctcctgtctcacggtgacctcttccccagcacagtttagctgcagaatacacactgttgtcctcagcacatagatcattctcaaagatagaccatatgttgtcatgaaaccagtcttgaaacattaaaaaaaaattgaaatatgtaatcccagcactttgggaggctgaggccagtggatcacgaggtcaggagatcaagaccatcctggctaacacagtgaaaccccgtctctactaaaaatacaaaaaattagcctgggcgtggtggtgggcacctgtagtcccagctactcgggaggctgaggcaggagaatggtgtgaacctgggaggtggagcttgcagtgagcagagatggcgccactgcactgcagcctgggcaacagagcaagactccatctcaaaaaaaaaaaaaaattgaaataatatcaagccacttctttgaccacaatggaataaaacaagaaattggtagcaagaggagttttggaaactatccaaatacatagaaattaaacagtatgtacctgaatgaccagtgggtcaatgaagaaattaagaagaaaattaaaagttttcttgaaacaaatgataatgaaaacataacataccaaaatgtatgggatacagccagggcagtataaagacggaattttatagctctaagtccccacatcaaaaaagagaaaagcttcaaataaacaatataatgatgcatcttaaagaattagataagcaagagcaaaccaaacttaaaattagtagaagaaaataaataataaagatcagagcagatacaaatgaaattaataaaaagtgttttttctgataatttaaacaaaattagcaaaccttagccagactaagaaaaaagtagagaagatatagataaataaaatcagaaatgaaaaaaagacacattacaactgataccacagaaattcaaaaaattattagtggctactctgagcaactatacaccaataaattggaaaatctagatgaaatgaacaaattcctggatacttacaacctatcgatattgaacctggaagaaattaaaagcctgaacagtccaataataaataataaaatagaagccacaataaagtctcctcataaagaaaagcccaagacctgatgccttcactgctgaattctactgaacatttaagaaaaaattaatgccaatcttaccgatactattcagaaaaacagaggagggactattactgaactcattaaaagaggccagcattatcttgatatcaaaaccacacaaaaacccaccaaaaaaggaagagaaaccataggccataggccataggccaatatctctaataaatattgatgcaaaaatcctaaacaaaacactagcaaacctgaagggggcctgccccttcacacctgtgggtatttctcgcaaggtggagatgagagactgagaaaaggaaataagacacagagacaaagtatagaggaagaaaagtgggcccaggggaccagcactcagcaagtgagacctgcaccagcactggtctctgagttccctcagtatttattggtcactatctctacaatcttggtgagggagatgtggcaggactatagggtaatggtagggaaaccattaccaaatcagcaggaaaacatatgagcaaaggaatctgtgtcataaataagtttaatgaaaggtgctgtgcctggatgtgcacgtaggccagatttatgtttaactttacacaaacatctcagagcagtaaagagtagcagagcagtattgctgccagcatgtctcacctccagccatagggcggttttctcctatcttagtaaatagaatgtatggtcaggttttacactgagacattgcattcccagcgacgagcaggagacagatgctttcctcttatctcaactgcaaagaggccttcctctttcactaatctccctcagcacagaccatttacaggtgtcaggctgggggactgtaaggtctttcccttcccatgaggccatatctcaggctgtctcagttgggtgaaacctggacaatacccaggctttcttgggcagaggtccctgcggccttctgcagtgcattgtgtccctggttaatcgagaatggagaatggtgatgacttttaccaggcatactgcctgcaaacaaattgttaacaaggcacatcctgcacagccctaaatccattaaatcttgattcaatacagcacatgtttcggtgagcacagggttgtgactaaggttacatattaacagcatctcaaagcagaacaatttttcttagtgcagataaaaatggagtttcttatgtcttcctttttctacatagacacagtaacaatctgatctctctttctttgccccatacaaaccaaattcaacaatacattagaaaggttgaccaggcatggtggctcatgcctgtaatcccaacactttgggaggctgaggggagtaattacctgatgtcaggggtttgaaaccagcccgaccaacatggcaaaaccctgtctctactaaaaatacaaaattagtcaggcgcagtggtgagcgcctgtaatcccagctatttgggaggctgaggcagaagaataacttgaacccagaaggcagaggttgcagtgagctgagatcacaccattgcactccagcctggatgacagagcgagacttcttctcaataaaaaaaaaaaaaaagaaggaaagatcatttatcatgtccaaatgggatttattcctggaatgcatggatggttcaacatatgcaaatcaattaatatgatacctcatatcaacagaatgaagaacaaaagccatatgatcattttaattgatactgaaaaagtgtttgataaaatgcaacatttcttcacaataaaaaccctaaaaaaattcgtgatggaaggcccataccttaaaataataagccatatatgacagacccacagctagtgtcatactcaatgaggaaaacctgaaagccttttgtctaagctctgaaacactacaaggatggccgttttcacactgtcattcaacatagtaccagaagtcttagctagaccaatttgacaagagaaagaaacaaagggcatccaaattggaaaggaggaagataacataatcttatatttggaaaaacctaaccactccacaaaaaactactagaactgataaacaaatttggtaaagttgcaggatacaaaatcaacatataaaaattagtagcatttctacatgcaaacaaggaacaatctgaaaaaggatttaaaaagctatcttatttacaatagccacaaagtaaattaagtacccagaaagttacttaacgaaagaattgaaagatatctgaaaaagtctaaaaaacgaatggaagaagttgaagaggacaccaaaatggaaaaaaatattccacgttcatggattagaagagtcaattttgttaaaatgtccatactaccaaaggtaatctacagattcaatgcaatctttatgaaaataccaataacattcttcacaggtgtagaaaaacaatcctaaaatttatatgaaattataaatgactgagaatagccaaagccatcctaagcaaaaagaacaaaactggaggaatcacattacctgacttcaaattacactacagagctatagtaacaacaacaacaagaacaactacaaaaagcatggtactggcataaaaacagaaacagaccaatggaacagaatagagaacccagaaacaaatccacacacctacagtgaactcattttcaacaaaggtgccaagaatatacactgggtaaaagacagtctcttcaataaatggcataggggaaactatgcagaagagtgaacctagaaacctatatctcctcatgtacaaaaatcaaatcaaaatggagtaaagatttcaaactaagatctcagactatgaaagtactagaagaaaatacggggataaatcttgaggacatttgttctggcaaaaatttcttgagaaataccccacaaacacaggcaaacaaagcaaaaaaaacgaacaaatgagataatgttaagttaaaaaactgcctagcataggaaacaatcaaaaagtgaagagaaaacccacagaatgggagaaaatatttgcaaactaattgcctgacaaaggattagaatggtttgaattccttgacaaaaaaaaagtgaagagaaaaatgaaataagagggagaaggaaggaaggatggaaggaaattctaattcactccacatttgaattctaatataggttttaaggatgcttcctttcatcacaaaaagaacttgaggaggggtcctgagtcctccaccccaggtgaagaagactgcattgtgactcaagtccaatcacctgtacctgcacctgtcctcacacaggtctggaactaagaaacaaataaccaataactagacttaagaatctcaactttctccacaaatttgcaggagaaagggtgtctctgaaaatttggattcccatggacgctcagagaaaagaaaagggtgtgggtggagcccaggtgtgtgagaggcagatgggaaagaccctcacctggcaaagccaaggggaccagtgtgggatcagggggacacaagggctttctctacctccctccataggtcctgcttaggatcaagaccagtgttctgtcagaacatctgtagaccaaaagaagtgttacctcccagggcaaatgattttcaccaaaatcctcactatttttaccattgcacagattaggaaaattaggaaatgtacattctgcacagtggagagaaggcttaatgagaggcatgggggctggacttcacaacccctcaccctcatcctcactccatcatccttgtctgtgcatttccctggtgaccccttcctccccctggtgtcttccccaccgtcatttctgctgcatcacagacacaggcttgcaaaaaagtgtggttatgactgagtctgtttctgataccctggggctatggtgtctgagacgttgcatgttgtcaggtgtggaccctggaccagtgtaaccttctgtgagggtgtgatggtgtctgatgagagtgaactctgctgagatgatgtgactttaggtgggaggtggagagcccaccaggatgggtgggatgtgcctgagtgtaaaagggtgactgttttgtcttcccgactgtgatgtgagtgtgtgtgtgagcaaggccagaccaatgcatgagcatctttataggcacagcgagcaggcatttgtgactcagtgagtggggtgactctgtgcgactatgggtgtgtgtgagtgctgggatatgactgggtgttgaactgggaacatgcatgtggccttctgtgcatgtcaagtttcctcctcacacagcagggcctctgatgaagcagctgtgcatcttcccatgtgtgtcaatgtggatgccaggtggcagaactggtgtgaatcttggggactgtgagttatcaatgactcatttgtgagcattaatgagagcagaaagcatgctctctagatgcctcttcccaagcagagtgggaaagaggaatgcagatcataggagtgatgtttcctcaggtaggttctgcacacagtgaccaccatctcctgtctttcagcctcatgtctcttcctggctcccaccaaagcctgcccttcttattgtgggtctggagagtttgcagatcctggctctctaaggaagagcattagagtctgtggtttcggatactaaatcaccctaaaccaggaaggaacaagtgtagcctcagttcagacagagtttacagtggatattaatcatcagagtagctgggttcactggctcatgcccataatcccagcactttgtcaagcaaagatgggaaaataacttgaggccagaggtttgagaccagcctgggcaatatagtgagatgctgtgtttacaaaaacttttaagtatcagacaggcattgtggcaggcctctttcatcacagctactcaggaggccaaggcatgaggatcccttcagcacaggagtttgtggctttgtgagctattggtgcaccactgcatgtcagcctgggtgacagagtgagatcatgtttcaaaaaggaagaaaaattatacacttgtaggttctctctaattacttccctgacccacacttttcatttgtccaagtgctggagctgtgtcctcaagatttttacaacttctgggaaggacgtccattgcccttgatgactgtgatgcacgtgcatcccacacacaggggttttctgttctttttcaatttccctctctctttcaacaagtgttgcttcttactggagtgaatttctctgctgttacatcctcaagtctagttttcacagtttcagagttgaaattgatctcaggtcaatattccacaaggacccaatccatagtgttaggtcacccccaacaagccctgtacatgccagggattaggctaaagattttacacgtattaacttctgtcactaaaatcaccctacaaagtaagaatttctaataaagacaaaaaagtaaaaagtaaagaaagcaaagaaaaataagagttttaaataatcctcctggtacctgggaaactaaggtaggcagcattcaagtaatagatctaagatggcacttccagtaagaggcagaatcaggagtggaatccaggcagcctgactcctgaatccttgttcctaactatgggaccctcatgtcttcaggaatatggagtcctgactgtgatagggtgaaaaagagaagtcctcactgtttgcctgttgatttctaaccttctgcatcatgggaatctgttagaaaaggggaggccacacctggccgggcccctctcacccactctcagtcccctagcaggtgccccacacaatgcctgtgtccttgtccattggttctaccatgacaatcagagggacaccgatcctcccttttttgtgagtactccatggtccatggcacgggggtggaaaagaagggagaatatttactcaggaagtggcctcatgtgagtgatgtggaaatgtctagttggcatgataaaggcaccaattaagttgcaggtcctggagaccctccagcaccaggcatgaaacctgcagtggttgcactttgggccagtcatgtggcctaggggaggaggacactcagggattgggggtgtggctcattatcaaggggcatagacttttcaaagaatggacaagtaatagctcaggtcagtgactgtggctcagtttccatcttgtgatgagtgacagagcatgtccccacctgggggaatgaggtgctaaaacagccccacagaaaccagtcctgcagtatcaccagggagcctgctttcttctttggggaaaggggggaagggatgtgtgtgtgttgagtgtgtgccccacgagggggaggggcttgcccaacactctgtgtgctttgccctcagcaatgacccagagctgcgggtggaattctacactgggacaaatgaggactcagacatcgccttccatttctgagtgcactttggccattgtctggccattgacagccatgtgtgtagggcctggaagtgtgaggggagatgccacaatgtgcccttttaggatggcaagccatttgatctgagcatcttggtgctggacaatgaataccaggtgagtgccctaggagctcccagtacccagccctccatgggctcccagagcaggaggcagctctccctggcttggccccaatagtccctctggacccacctcccataactagttttgctttgggcttttcatcaaaacgctctgcttgcgccatcatcctcagctcttttcccaaatctgaccagggtcaatatcagctcacctcgcatttcccccaaggtggagaatctcctctatcttttcccattgtggtcacttccactttatgctgttatttaaatttttcacttcgctgaatgaatacaatattcctaaaaataaaattgttttagtcaatcaaaaattaagtctatctcattcctggacccaatcttactcctgagaacattaccagtgctctgttctccttccacaggaaatctttgcttatggaagcatatagatctatactttcatttgtttttaagaaattcctagtatacattgctttacacattaccctttaggaactgagttaatttgttgttaaaaatatatatcttgaagacatcttctattaatggtgctgcctcaatttttaaagattgcataatgttgcattagagcaattacccaaaattattgaccttgactcttttgatgggcattgaggttatttccaatattttgctctcacagatggtgctgtaataagatttctagtaaattcttttgtcattatccacctctcttacttatgatgaaaaataatcagaaagaaatgaaataacaggttcaaaaatgtgtgcattttaaatttaacaaattgacacctagaaggttactttacagccttagtaataaagaatatgtccaaatgttctggctctttctaatgtgtagggcaaacgccaaaagattcacattttattcagattcaagtgagggatctttatctgtgcttagaagctgtttaaaatgatatcttatgttttgcaacacttgtccgattctacctttccaaaaacacttgaaatctattcttggccaccaccagcccagatctaggtaactccaaagagaaactgggccatcagcgtgagtggcagtcagagttcataaaactgaaagatatgcattcaacgaatatagtctagcattaatcctgtgtggactcctgtacaagatgcagggattcaagctcatgaaacagagtcactatctatgggggttttccaggctagaggggaggctgagcaaacatagaccagccttgctggaagtatgagaggaaaaattagaaataaagcaaacaactgtctcaaataggtacaaaagttgatctgcaaacagaagtgtgtgttttgagttcagttatataactaggagttttctcacgggatgttgtaggtactaggacagagtaaagaggaggctgaaagcttgtttggtggcatactgtctttctaatgcatttttccttttgtaggtaataataaatagccaacactgttgcagctttgtccataactcccaccatgttctgtgaagatggtgcaagtgtggagagatgtctccctgacctcaatgtctgtctgcagttgatgcagatgatcacactcctcattgttgaggaatccctctttctatgtgaccataggatttccagagcctactaacagcatgatctctcctcactgtttctgctacacttggtcattaaaacatcaccaaactaccgaggatttgtttggttcttgctttaagggagaaagagaaagtggtcattcccaggagggcccaaggaattctatgagaggcatcaagaaatcaaaaaggataagccttcgtgtgacttcaggagtgagtgacaaggtccctggaatgtctgagaagacattaggtacagcatccttctatatcacattgttgacatcagagactctgaaacaaaatccttactcaatctcagatgactcactgcactgaaatgttaggtagctgtttacagccacacaagtgtacctcagggaagaaatttggtaacttgaggacaatctggtggaatttcctaattccttccattgttctcaggatatttattgtgtataaacatggtgctttggtctgtaaagactgccatgcaggacctttaaaaagagacacatttctgacatgaaaattttaatccaaacaatagttagagaatcacaggagcccaaaaatttctcttaaagaacctcaaatgttgatgtttaaagataattgtgagttttttctgatgtatgtggcagaatccttagatttctatttggaaacaaatggtcatggtttaagtccagaaaatatgtagtttattgttgggatggacagaattcatacacatggacacagtgagcagaccttgctttgctgctgtttcactaggcattgcagcacagcaaacctcccaacacatgttggcttagagcaatcatttattctgacctttctcagttaactggactcatgtgagaggtaggtcatgtggtgagaatcatgttttccgaagcatctttcaggctgggattccagaggatgcttcactgatgcctgacccaacactagagctgggtgaacatctgggggctggctggttattttattccctacttcacctccccattcatgccttgaattttctcaaatcatgagagtctcatgattcttagacttaatgaatgataattggcttccactaaagaaagccttccaaaaggctcaggaagaaggtgcaaggcatcataggacctagctttgaaaggcacacagtatcagtactgtgacattatattgatcaaagtgagctatacagacagcccaaatcaaagggtggggattccataagctgtggttattttgacctgttgtcatgagggagcatttttggcaactattcccactcattcctcagtggcttaaatgctttccacattccaaaaacactatcctgtaaggaaccactgaatgcaatatgattacagaaacaggctcagattgaagtttagagtcttatcgtttaatcaggatctggtgtccatgaggtgactacaaattatcaggtgcactttctctcaacatatgcattaaatgaatacattacctcccctatacaaatcaaacatacaagactgaaacagatataggaaaatgcagtggacacatctattttagaagggcaaaaaataataaacagcaccctgaaagcaagatggtcaccaatagctctactggagctacccacgaaaattcagccagggttctcactcttgttacatctgctcaaaccagcatggccttatccaaaaatactgtcttgatgtgtgccgcttgtgtttccataagtacttaaaggatatatttttcattaagttggactaagtgatcttccttgaattgatatgcaagacttacatccaatgaaagaaactgtgctagcacattaaacatgaatagagattaaaacaaagaaacaaataaaaacaaacaagaacaaaaaagaaaataggcagcagtcactcgtccacattattggaccctattttcatcttctctgaaagtggttccctgtgacaattggctccaccatctattgtcagtttcttggaactcctaccaagatgacacaatgacagcccttttctcgatacaggagctgtggtcacctggttcatagaacaaaaagagaaccacttagaagataaacagcaaattacctaaaagccaaacaatgcagattgaagagggtctcatcaaatagcctctttgtcagcagggcccatatcaggtggcattttgatcatcctcatcctgtcttcccatgtttattgccgcagcttgttcaacagcaaccttactcatagatatgcctctctcctttccctcctttaacctaacatccagttaccttgaggtgtcaatgcacagtaaataatacattcatgcctctcttttttgtttctttccagtataagctgaaattttctcccctctcactggaaagtctcaggttcttgttaggtatactcacctccttgtatcatcccactcacagttttggtcacttctctattttgatgatggagcataggcctcctcaccagcatggaagtcatttttgggcaattaggcaattcttgctcagagtggattaagactatcttggaacccataacccatgaagttttttttttttttgagatggagtttcactcttgttgcccaggctagagtgcagtggtgtgatctcgggtcactgcaacctccaccttccagtttcaagcaattctcctgcctcaacctcccaagtagctgggattagaggcatctgtcaccatgtccgcctaatttttgtatttttagtagagaaggggtttcaccatgttggccaggttagtctcgaattactgacctcaggtgatacacccacctcggcttcccaaagtgccgggattacaggcgtgagccactgcgcctggccagaacccatgaatttctgagcagaacatgagtttaatttcatatctatatgtccctggatgattccaattgtatttgaataacctacagggtcctacatgctgcctgtgctagacaaacacacagtgactgccttttcttaactgatattcaccagctcagttcagttcacataggccatttgttacactcatctttatactacctactatcctgtgctcatggtagccaggagtgatgtctcagataaaaagataacacatagagaccaggaagcaatgttcaacaagcaagttttgatttgcctctggggacctactcaacatctttttcatgctcctcaacctaaattcactaaatacagcattcccactaaatatagcattgctcaaaacacagaaggttattcttggactctaaagccttgccttctgaaaggtctggagggcttttcagtttttgctgaaagcccccaaagaataaatctagtctttgaaaatgtccttgatgcctaagtccaccaaagctgtttcctctggggtgctgtccgtgatgctgagcactggtgcttctaggcctgtatttgcaagtgaggggctaataaaacagaattaggagataaattttttgttttgttttgtatttgataaattgcagctcaaaatatgcatgatatatggagcaggaaatgaatttggattttcaaaccacaatttctgcaatgccttctatcaccacttttattcagcatagtatttgaagtaccagccagagagttcagcaagagaaagaaacaaatggcatccaaatagagaacaaggttaaaccatccatgtttagagatatgattctatatctggaaaacctcacagtttccacccaaacgatcgttaagctggtaaacaactttcgcaaagtttcagcatacaaaatcaatgtgcaaaaatcactagaattcctacatgccaaagacaacgaaccacagggccaaatcaagaatgcaattccattcacaatttccataaaaagaatagaatatctaggaatacaactaactgggaggtgaaagattgttacaatgagaattacaaaacactgcttaaaaaagtagagaagacccaaacaaatggaaaaacattccatgctcacagatagcaagaataactatcattaaaacaaccacattgcccaaagaaatgtacagattcaatggtattcctattgaactatcaataacattcttcacagaattagaacaatctattttaaaatgaatattttaaatattaattgaaccgagtgggttgaataaaagatattccaaagcaaaaagaacaaagctagaagcatcacattacccaacttcaagctgcactatagggccagagtaacctaacagcatagtacttgcataaaaacagacacatagaccaatggaacagaaaagagaggcaagaagtaaggtcccacacctacagcaatctgatctttgacaaagttgaccaaacaagcaatggaaataatttttggataactagctagccacgtgcagatgattgaacctgaaccactttcttgcgttatatagaaaaatcaactgaagatgggttaaagacttaaatgtaaaacccaaaactataaaaaccctggaagtctacctaggcagtaccataccgaatgtagaaataggcaaaagattcctgacaaagatgccaaaagcaatcacaagaaaagcaaaaattgacaaatggatctatttaaactaaagagcttctgcacagcaacagaacctatcaacagagtcaactgacaacctacagaataggagaaaatatttgcaaattatgtatctgaaaattgtctaatatctagcttctataaggaactttaacaactttacaagaaaagaacaaacaaccccataaaaaagtgggcaaagggctgggtgcagtggctcacgcttgtaattccagcactttgggtggctaaggtaggtggattgcttgagtccagaagttcaagaccagctttggcaacacggcaaaaccctatctctatgaaaaatagaaaaattagctgagtcttgtctcaggcacctgtaatctcagggactcaggaaggtgagctgggaggatcgcctgagcccaggcagaggttgcagtgagacgagatttcaccactgcacttcagcctgggtgtcagaccaggctgtctcaaaaaaagtagacaaagaacaggaacagatacttcttaaaagaagacatacatgtggccaacgagcatatgaaaagaagctcaacagccctgaacgttagaaaaatgcaaatcaaaaccaccatgggataccatctctcaccagtcagaatggctagtattcaaaagtcaaaaaataacagaaactggcaagtttgtgaagaaaagggaacacttacacatttttggtggcagtgtaaattagtttaatcattgtggaaagaaatgtgatggttcctcgaatggctaaaatagaactaccattcaacccagctatcccatcactgagtatatacccagaagaatataaatcattctaccataaaaacgtgcacatgaatgtttattacaacagtatgcacaatagcaaaaacatggactcaacctaatagctcataaaggacagactggatagagaaaatgtggtacatatacaccatagaatactatgcagcctcaaaaaagaatgagattatgacttttgcaggaacatggatggagttggaggtcattaaccttagtgaaccaatgtggaaatgaaaaacaaaatactgcatgttctcacttagaagtgtgagctaaatgatgaggcccatggataccaagagggaaacaacacacactgagacctacttaagggtggagggtaaaaggtgagacaggagcagaaaaaataactattgggtactaggcttagtacctggatgtgaaataatctttaccgcaaaccccatgacacgagtttccctgcatatgtacccctgaacataaaataaacgtttaaaaaacaaagaaaaaaaccaatgtcacctttcttctggaatctgcaggagaaacagtgtctctgaaactttgattcacatggacatcaagagaaaggagagagtattgctagagtccaggtgtgggacagacagatgagagcagccctcacctggtagagccaaagggcttagcatggggcaggttcatgcaaggacgttctctacctcccccccggatcatcctgaggatcaagggcagtgctgtcccagaatctttaaaggcaaaaagaacaatttaaaggcagaatgtatgatctgtaggtgtctctttccaataagtgtggggaagaggaatacagactacgggggtactggtcccttaggtgaggtctgcacagctggtatgcagtaccagctactcaggatactgagctgggaggatcacctgagcccaggagccagaggttgcagtgagccaagatggagccacaccactccagcctgaatgtcagagtgagacctgtcttaaaacaacaacaaaaggcgagaaaagacaagaacagagaacagatacttttcttttcttttcttttcttttttttttgagatgaagtctcactctgtcccccaggctggaatgcagtggcatgatcttggctcactgcaagctctccctcccgcattcatgccattctcctgcctcagcctcctgagtagctgggactataggcgcccgccaccggcccggctaatattttgtatttttagtagagacaggggacgcttctcaaaagtacacatacaggtggccaacaagtatataataaaagctcaatatcactgaacattagagaaatgcaaatcaaaactacaatgagataccatctcacaccagtcagaatggctcttcttaaaaagtcaaaaaaggacagatgctggcaagggtgtggagaaaaaggagcacttacagattattggcggtggtgtaaattagctcacccattgtggaaagcagtgtggtgattcctcaaagagcttataacagaactaccattaaaccccgcaatcccattactgggaatggtgtatacactactgtatacacagaagaatagaaattattctgccttaaagacatatgcatatgaatgttcattgcaacactgtgcacaatagcaaagacacagaatgaacccaaatgccatcaaggacagattggatacagataatgtgatacatatacacaatggaatactatgaagccctaaaaaagaatgagttcatgtcttttgcaggaacatggatggagctggaggccattatttttagcaaactaatgcaggaacagaaaaccaaatactgcatgttctcacttataattgtgaactaaatgatgagactcatggacaccaataggggaacaacacacacagaagcctacttgaggttggagggtgaaaggtgagataggagcagagaaaataactattgggtactacgcttagtacccaggtgaagaaatcatatgtaccacaaacctcatgacatgactttatctgcatatgtacccctgaacctataataaaagtaaaaaaaaagaaaaaagaaaaaaaatctcatctttctcccagaatctgcaggagaaacaatatctctgaaactttgttttacatggactccaagacaaagcagagaatgcagctagagcccaggtatgtgacagacagatgagagtgaccctcacctggcagatccaaggggcctagtgtgaggcaggttcatgcaagaactatctctacttctcttcccagatcctcctgaggatcaaggtcaaaaggatctgacccttaaaggccctcccagaacctttaaaggcaaagagaagaattaccttctaggtctaacgtctttttccaaaattcccaattttttatttttagtcattgtacaaattgaggaaatgtacaccttctggctagattctgcatactggagaaaaagcttgagaggcacaaaggctgggctttacaatccctacccctcactccatcatccttatctatgcatttccctggtaacccaatccacagcctggtacctcccccactgtcatttctgctgcattacagacacagacctgcaaacatctatggttgtgacagagtttctttctgacacctgagtctttctcctgctgcacggaaagcttgctgggaggggcttggaatctggcatgaagccaaagggcatctctgagttgcagcatttaaatgatcccactcagagattcacacagaagactggacacaattccgaagagctgcccagaaggagagaacaatgtcatcactacccgtgagttgaaaagtcacagccttcaataatctcaagtcacataaaccaagaaagaaacaggggaggttttctgagttgaaaatatgagcattcctactgtgaatgcattaccgagagttgtgggtgtgtagaagagaaaccctgaggctgtggtatctgagatgattgtgggtgtaggctgtggaccctggaccagtgtaaccctctgtgagggtgtggtggtgtctgatgagagtgaactctgctgagattaagtgactttaggtgggaggtggatgacccaccaggaccggcaagtgtgtgagtgagtgtaagggggtgagtgtgctttgtcttcctgtctgtgatgtgagtgtgtgtgggcacagccagaccagtgcatggtcatctttatgtgcacagtgagcaggtgtgtgtaactcagtgagtggcatggctctgtgtgactatgggtgtgtgtgctgggatgtgactgggtattgaagggaaaacatgcacgtggccttctgtgcatgtgaaggttcctccccacacagcagcacctctgatgaagcacctgtgtgtcttttcatgtgtggcaatgtggatcccaagtggcttaactggtggggatcttggggattgtgagttaccaaggactcgtttcagatcacttatgagagcgaaatatatcatcagtagatatctcttcccagtaagagtgaggaaaaggaacgcagattatgggagagatggttcctcaggtggggactgcacagagtgatcactggcttttgcctcccaggctcagcttccctgtcgctagcccagcctgttcttcccattgtggaacaggcgagtgtgaagatactgatttgccagggaagaatattagaggccgtggttaaagagacggaatcaaacaaaatatccactgtaagctctgtctgaactgagactaaacttgttcctccactcatgaaagaacaagctgtctgaattcagacagtgcttactgtggacattactcaacaaagcagctgggttcactggttcatgactataatcccaccaatttgggaggcaaagatgggagggtaacttgaggccagaaatttgagaccggtctaggcatcatagtgatatgctttctttaaaaatctttaaatatctgactggcagagtggcagacacctttcaccccagctacacaagagggggcagatgtgtgaggatcactgcagtccaggagttcgatgtttcagtgagctgtgattgcaccactgcatatcagcctgggtgacagagcaagaccctatctcaaaaatacagaaaaatcatcaaccacttgcagtcgtcgtagaaatcaatcattccctccagttatgtccctgacccacaggcttcatttgtgcaagtactggggctgtgctgtcagtaatgtgtgccgcttctgggaaggacgtccattgcccttgatgattgtggtgcgtgtacatcccacacacaggggtttcctgttctttcgtcatttccctttctctttcaacaagtgttgtttctcactggagtgaatttttaaattctttcaccctcaagtcttgttttcattttctgagttgaaaataaggcaggtcagtgtttcaggaggactcccctgttctgttaggtcacccctaattgaccctatacatgccagggattagggtaaaagttttacctatattaactcctctattactgagaacaccctacaaagtaggaattcctgatagtcctccttgtcctggggaaactgaggcagggagaggttaagtaatagatctaagattgcactgctagtataaggcaaaatgaggactggaatccaggcatccgggctcttgaacaattgctcttacctatggatccaccatatcttcaggaatatggggccctgactgtggtagggtgaaaggggagaggcctcagagtctgacctttgatctctaacctcctgcaccatgggaatctgttacataggggaggttacaccttaccctttagctctcactcactctccataccctggcaggtaccatacacactgcctgtttccttgcctgttggttcgtgcgtgataatcacagggacaccgatcctcacttttgtgtgagtactccatggtccaatggagggggtggaggagagaagggagaatatttgctaagggtttaaccttatgtgtgagtgatgtggaaaactctagttggcataatgaaggcctcatgcaagtgcaggccctggagaccttccagcaacagacatgagacctgtagaaactgcatgcaggccagccacggaacctaggggaggagaacactcagtgggtttgggttgtggctctttattaaagggcatagaattttcaggaaatgaacaagtcataggcccatgtcactgactggcgctcagtttttgtctggggatgaggaacacagcatctccctgcctgggggcatgaggagctaaagcgtccccacagggaccaggactgcagtatcatcggggagactttttgccctgggtaaaggggggaagggatttgtgtgtgtggcgagtgtgtgtctgcacaatggggggacctgcccaacatgctgtgtgctttgacctcagcaaggacccacagctggaggtgaatttctacactgggatggatgaggactcagatattgctttccaattccgactgcactttggtcatcctgcaatcatgaacagttgtgtgtttggcatatggagatatgaggagaaatgctactatttaccctttgaagatggcaaaccatttgagctgtgcatctatgtgcgtcacaaggaatacaaggtgagtacttcaggatcttccagcgctggagctctgtgggctcttagagcaggaggcagctttcattgacctggtgccaccagtcccttggggcccatcttccataactattcctgtttcaggttttcatcacagagcaccctctgcttgcactgccatcctcagctctttcccaaatctgaccaagatcaaggtcggctcacctgccatttcctccaaagtggagaatctcctctgtcttttcccatagtgctcatttctacttatgccatttttaaaattttcatttagctgaatgtatactatatacttaagaaaaaggtggttttaatcattcaaaaattatgtttcaattttgggcccaattctactcataagaacaccattactagagttctgctcttcttcagaaagaaactttttatttttttatttttttgagacagagtctcactttgtcatccaggttggagtgcagtggcgtgatcacagctcattgcaaactccaccacccagattcaagcaattctcttgccttagtctcccaagtagccggaattacaggtgcatgccatcacaccttgttaacttttgtatttttagtagaagaagagtttcaccatgttggccaggcttgtcttcaactcccgaccttgtgtgatttgctcaccttggcctcccaaaatactgggattacaggcataagccaccgtgcccagcctttcagaggaaatcttttcctatggaagcatgtagatatgtctatgattgcatttgtttttaagcaaatcctggtgtaagttgctctacacattacactttagcaactaagttgatttgttgtcaaagaatatatcttgaagacattatcaatccacggtgccgcttcagtttttaaagattacataatattgcattaaaaagtttacccaaaattattgaacttgacccttttttgggcattaaagttgtttccagtattttgctctcacaaatgatgccgtattaagttttatagtcaatcctcttgtcattactaatttcccaatacttatactggaagataattagaaaaaaatgaaaaaaacagctcaaaaatgtgtaaattttaaatttgaaaaattaacactaagaaggtgactttctctatagcctcgacataaggaatatatccatagtttccattctttttggctttctctaatgagtaggccaaaagattcacatcttattcagattcaagtgagggatcttttcctaggcttaaaagttgttgaagataatatcctatgttttacaagacctgtcctcctttaactctctaagaaccctgggtttcattctttgccactaacacctcagatgtaggctactccaaagaggaactgtgccatcagtagtgaaaggcagtcacagttcatggaactgaaaagtatgcattcaatgaacatggcctcgcactaaccctctggcaggtcctgtgcgagatgcagggtctcaagttcctgagacaccgtccctggtgatggggatcttccaggttggaagggaggccgagtaaacggactgtgtgacacggtgtataacttcactaggggaatgagagaaaacattagaaataaaatgagcatctgtctcaaataggcacgaaacatagcctgtaaaatcacagaagtgtgtctactaggttcacttgtgtaactaggagttttcatggggaaggttatttgtaactgggcagagaagagaaagggctgaaaacctgtttggtggcatgctgtctttctgatgcatttttcctcttgtaggtaatggtaaatggccaacgcatttacaactttgcccatcgattcccgccagcatctgtgaagatgctgcaagtcttcagagatatctccctgaccagagtgcttatcagcgattgagggagatgatcagactcctcattgttgaggaatccctctttctacctgaccatgggattcccagagcctactaacagaataatccctcctcaccccttcccctacacttgatcattaaaacagcaccaaacttcacatgattggttcttgctttaagaggggaaaagaggaagtggtcatccccaagagggtccaggacattctatgggaggcatcaggaaatcaaaggggataaaccttcctgtgacaaagggagtgagtgacaaagtccctggaatgtctgagaagacatcagaaacaacattcttctatagtaggtagttgatgtcagacagtctgaaccaaaatccttacccaatgtcagatgactcactgcactgaaatgttaggtagctgtttacagccacacaggtatacctagtggctgtgggcagaacctgtaacttgagggaaatcatgtggaattccttaatttttttcattgttctcaggatgcttattgtgtaggcacattgtgaagttttcaatctaagtagtagggaaatattggagcctagtgttttccttaaagaatctcaattattcttatttccaaatattcaaagatttttccattttatgtgtgcagaattaaggggtttctctttggaaataagtggtcatggttttagatcagagaacatgtagattattattggaatagacacagtccatgtacatggacacagtgagcagacgctgctttgctgctgttccagtgacaaattgtagcatagcacacctcccaacacatattgactaaaaacaatcattaattttgatctctgccagctttacaggtttattcaactcatgtgagtggtaggtcatgtgatgagagtcatttacagagaaatcttttaggctgtgatttcagaggatgcttccctcctgtccaactcaacactagggctggatgaacacctagaaactggtgggttatctctttcactaccacacctttccattcattccttgaatatgttcaaatcaggagagtctcacggttctcggacttaaggaatggtgattggctttcagcaaagaaagccttccaaaaggctcatggagacagtgcatggcattataggacctacctttgaatggcagacagtgtcacttctatgactttacattgagcaagttgagtcacacagagagccctaatcaaaaggagaggactccacaagctgtgattattgtgactgtagtcatgaggagccatctttggcaaccagtttcactcagtcgtaactggcttatatacttcccacatactaacaacactaaccctgtaaggaatctctgaagacattactataacaggaacaggctcagagttaagtgctgtatcttatctaatcaggatgtggtgtctataaggtgactacaaattatcacttgcaatctctctcaacatgtgcacaaaagggacacattatccgctttatacaaatcaaacaaaaaagacaaaaagagataggaaaaaggcaatgaacacacctattttagagaggcaaaataaaatagacagcagtcactaatccatatcactggtgaaaccaaccagacatctattttcattttctctgggaatgtttctctgtagcacttgtcctcaccctccattctcagcttcttggatttcttaccaaaatggcagaatggcagcccttttcccactgtaagagctgtgattatctgcttcatagcatgtatggagaaccacttaggagaagagaaacaaaatattatctaaaaatcaatgaaggcaggatgaagagagtcccaccaaatagcctctttgtttgcaaggaccatcttaggtgtcattttaatcattctcattttctctctccatgttcactgcaacagtttctgcaactccaacctcactcatgggtatgcctctctgcttacccctcctttaacctaacatccagataccttgaggtgccaacgcacagtgaatggcactcttcatgcctctcttccttgtttcttttcagtatggaatgaaattccctcccctctcactggaaactcttgtgttctgattagatacactgtcctccttacaccttccctgtcacagtcttgatcacttctttattttgataatgaattataggccctatcaccagcatggaattcatttttggggggaattgtgtaatttgtgctctgagtggatgcaaactatcctgaaaccactggcttcatgagcagaaaacgacttggatttcacatcaacttgccgcttgcctggcagtcattttatttgaataactgacataattttacatgccggccctgttaggcaaacacacagtgattgtcctttcttgaatgatattcaccacctcagtgcacttcctaaaggtcattcgttacattcatctttattcagctgctactctgtgttcatagtggtcaggaattacatcttagatacaaagagattacatagagtccagggtgaatgctcaactaataatttttgaattgcctctgaaaatctactcaacatttttcctcctcctgctcaatcaaaattcattgtcttctcccagcaaaaaggggattggtcaaaaagcagaaactctttaatgaactctaaagcctcctcatctcaaaggtcttttggtctttccagttataacagaagcccccaaagaataaatatactctgtgataataatgtccttgatgcctaactctctcagtgttgcgattcctctgggatgccatctgtgatgctactaaacattggtgtatgtgggcctctatttgcaagtgatggaccaagaagatagaataaaaaagaaatttaaaaaatttccccattttatttatttttaccattctttaacttttcttttaagttcaagtgtgcatgtgcaggtttgttatataggtaaaccccttgtcacaggtgtttgttgtatagattatttcaccacccaggtactgagcaaagtaccaatagttattttttgtgctcttctccctcttctcaccctctgctctcaaataggccccagtgtttgtcatttacttctttgtggttatgagttctcatcgtttagcttccacttataagtgagaacacgaagtatttttcttctggtcctgcattaatttgctaaggttaatggcctctagctccatctatgttccctcaaaagacatgaccttgttcttttttatggctgcataatattccatgatgtatatgtaacatattttctgtattcaatctgtaattgatggacatttatgttgattccatgtgtttggtattatggttttagtttgcatttccctgatgattagtaatgttgaacatttttttcatatatttattggcagtttttacatattttttgtctttgtactgaaattttattttatttttatttttttaactcattaatttagtttattttttcccataagttattgtgatacaggttgtatttggttacatgagtaagttctttatttgtgatttgtgagattttggtgcacccattacccaaactgtgtcatatttgtagtcttttatccctcatccccctccactcttcccccccaagtccccaaagcccatcatattatttttatgcctttgtgtcctcataggttagctcccacatatcattgagaacatatgtttgttttccattcctgagttacttcacttaaaataatagtctccaatctcattcaggttactgcaaatgctgataattcatttctttttgtggttgcatagtattccattgtgtgtgtgtatatatatatatacctacacacacaatggatatatatgtacctttttttaatccatttgttgattgatggacatttgtgttggctccacaattttgctattgtgaattgtgtcactagaaacatgcatgtacaagtattcttttcaaatattaacttcttgtcctctgggtagatacccagtagtgggattgctgaatcaaattgtagttttatttttagttcttttaaaaatctccacactgttttccatagcagccatactagtttacattcccaacagcagtatagaagtgtttcctgatcacctcatccatgccaaaatccttttttatttattattttttattatggccattcttgcaggaatgaggtggtactgcattattgttttgatttgcatttccctaataattagtgatgctgagcattttttcatgtgcttgttggccatttgtatgtcttcttttgagaattgtctattcatgtccctagcccgctttttgatgtggttgcttttttcttgctgatttgtttgagttccttgtagattctgaatcttagtcttctgtcagatgcatagtttgtgaatattttttcccactctgtgagtggtctgtttactctgctgattatttcttttactgcacagaagatgtttagtttagatagatctcatttatttattttcgttgcatttgcttttgggttcgtagtcatgaattctttacctaagccaatgtctagaagagtttttcaatgttatcttcttgaattttattttatttcattttattttaattttattattattatactttaggttttagggtacatgtgcacaatgtgcaggtttgttacatatgtatacatgtgccatgttggtgtgctgcacccattaactcgtcatttagcattaggtatatctcctaatgctatccctctcccctccccacacccatgacagtccccggtgtgtgatgttccccttcctgtgtccacgtgttctcattgttcaattcccacctatgagtcagaacatgcggtgtttggttttttgtccttgcgatagtttgctgagaataatggtttccagcttcctccatgtccctacaaaggacgtgaactcatcattttttatggctgcatagtattccaaggtgtatatgtgccacattttcttaatccaatctatcattgttggacagtggggttggttccaagtctttgctattgtgaatagtgcctcaataaacatacatgtgcatgtgtctttatagcaccatgatttataatcctttgggtatatagccagtaatgggatggctgggtcaaatggtattgctagttctagatccctgaggaatcgccacactgacttccacaatggttgaactagtttacagtcccaccaacagtgtaaaagtgttcctatttctccacatcctctccagcacctgttgtttcctgactttaatgatcgccattctaactggtgtgagatggtatctcattgcggttttgatttgcatttctctgaaggccagtgatggtgagcattttttcatgtgttttttggctgcataaatgtcttcttttgagaagtgtctgctcatatccttcgcccactttttgatggggttgtttgtttttttcttgtaaatttgtttgtgttcattgtagattctggatattagccctttgtcagatgagtaggttgcaaaaattttctcccattttgtaggttgcctattcactctgatggtagtttcttttgctgtgcagaagctctttagtttaattagatcccatttgtcaattttggcttttgttgccattgcttttggtgttttagacatgaagtccttgcccatgcctatgtcctgaatggtattgcctaggttttcttctagggtttttatggttttaggtctaacatttaagtctttaatccatcttgaattaatttttgtataaggtgtaaggaagggatccagtttcagctttctacagatggccaaccagtttcccagcaccatttattaaatagggaatcctttccccattgcttgtttttgtcaagtttgtcaaagatcagacagttgtagatatgtggtatgatttctgagggctctgttctgttccattggtctgtatctctgttttggtaccaataccatgctgttttggttactgtagccttgcattatactttaaagtcaggtagtgtgatgcctccagctatgttcttttggcttaggattgacttggcaatgtgggctcttttttggttccatatgaaatttaaagtagttttttccgattctgtgaagaaagtcattggtagcttgatgggaatggcattgattctataaattaccttgggcagtatggccattttcatgatattgattcttcctacccgtgagcatggaatgttcttccatttgtttgtgtcctcttttatttcattaagcagtggtttgtagttctccttgaagaggtccttcacatcccttgtaagttggattcctaggtattttattctctttgaagcaattgtgaatgagagttcactcatgatttggctctctgtctgttattggagtataagaatgcttgtgatttttgcacattgattttgtattctgagactttctgaagttgcttatcagattaaggagatttttgggctgagacgatggggttttctagatatacaatcatgtcatctgcaaacagggacaatttgactccctcttttcctaatcgcatgccctttatttccttctcctgcctgattgccctggccagaatttccaatactatgttgagtaggagtactgaaagagggcatccctgtcttgtgccagttttcatagggaatgcttccagtttttgtccattcagtatgatactgcctgtgggtttgttatagatagctcttattattttgagatacgtcccatcaatacctaatttattgagagtttttagcatgaagcattgttgaattttgtcaaaggccttttctgcatctattgagataatcatctggtttttgtctttggttctgtttatatgctggattacgtttattgatttgtgtatgttgaaccagccttgcatccgagggatgaagcccacttgatcatggtggataagctttttgatgtgctgctggattcggtttgtcagtattttattgaggatttttgcatcaatgttcatcaaggatgttggtctaaaattctcttttttggttgtgtctctgccaggctttggtatcaggatgatgctggcctcataaaatgagttggagaggattccctctttttctattgattggaatagtttcagaaggaatggtaccagctcctccttgtacctctggtagaattcggctgtgaatccatctggtcctggacgttttttggttggtaagctattaattattgcctcaatttcagagcctgttattggtctattcagagattcaacttcttcctggtttagtcttgggagggtgtatgtgtcgaggaatttatcaatttcttctagattttctagtttatttgcgtagaggtgtttatagtattctctgatggtagtttgtatttctgtgggatcagtggtgatatcccctttgtcattttttattgcatctatttgattcttctctcttttcttctttattagtcttgctagcggcctatcaattttgttgatcttttcaaaaaaccagctcctggattcattaattttttgaagggttttttgtgtctctatttccttcagttatgctctgatcttagttatttcttgccttctgctagcttttgaatgtgtttgctcttgcttctctagttcttttaattgtgatgttagggtgtcaattttagatctttcctgctttctcttatgggcatttagtgctataaatttccctctacccactgatttaaatgtgtcccagagattctggtatgttgtgtcttcattctcattggtttcaaagaacatctttatttctgccttcatttcgttacttacccagtcgtcattcaggggcaggttgttcagtttccatgttgttttgcagttttgagtgagtttcctaatcctgagttccagtttgattgcactgtggtctgagggacagtttgttataatttctgttcttttacatttgctgaggagtgctttacttccaacgatgtggtcaattttggaataggtgtggtgtggtgctgaaaagaatgtatattctgttgatttggggtggagagttctgtagatgtccattaggtctgcttggtgcagagctgagttcaattcctggatatccttgttaactttctgtcttgttgatctgtctaatgttgacagtggggtgttaaagtctcccattattatggtgtgggagtctaagtctctttgtaggtctctaaggacttgctttttgaatctgggtgctcctgtattgggtgcatatatatttaggatagttagctcttcttgttgaattgatccctttaccattatataatggccttctttgtctcttttgatctttgttggtttaaagtctgttttatcagagactaggattgcaacccctgcctttttttattttccatttgcttggtagatcttcctccatccctttattttgagcctatgtgtgtctctgcacgtgagatgggtttcctgaatacagcacactgatgggtcttgactctttatcgaatttgccagtctgtgtcttttaattggagcatttagcccatttacatttaaggttaatattgttatgtgtgaatttgatcctgtcattatgatgttagctggttattttgctcgttagttgatgcagtttcttcctagccttgatggtctttacaatttggcatgattttgcagtggctggtaccggtttttcctttccatgtttagtgcttccttcaggagctcttttagggcaggcttggtggtgacaaaatctctcagcattagcttgtctgtaaaggattttatttctccttcacttatgaaacttagtttggctggatatgaaattttgggttgaaaattcttttctttaagaatgttgaatattggcccccactctcctctggcttgtagagtttctgccaagagatcagctgttagtctgatgggcttccctttgtgggtaacccgacctttctctctggctgcccttaacattttttccttcatttcaactttggtgaatctgacaatcatgtgtcttggagttgctcttctcaaggagtatctttgtggcattctctgtatttcctgaatctgaatgttggcctgccttgctagattggggaagttctcctggataatatcctgcagagtgttttccaacttggttccattctccctgtcactttcgggtacaccagtcagacatagatttggtcttttctcatagtcccatatttcttggaggctttcttcgtttctttttattcttttttctctaaacttctcttctctcttcatttcattcatttcatcttccatcactggtacactttcttccagttgatcgcatcggttactgaggcttgtgcatttgtcacttagttctcatgccatggttttcagctccatcaggtcctttaaggacttctctgcattggttattccagttagccattcgtctattttttttttcaaggtttttaacttctttgtcattggtttgaacttcctcttttagctcagagtagttggatcttctgaaggcttcttctctcaactcgtcaaagtctttctctgtccagctttgttccgttgctggtgaggggctgcgttcctttggaggaggagaggtactctgatttttatagtttctggtttttctgctctgttttccccccatctttgtggttttatctacctttggtctttgatgatggtgacgtacagatgggtttttggtgtggatgccctttctctttgttagttttccttctaacagccaggaccctcagctgcaggtctgttggagtttgctgaaggtccactccagaccttgtttgcctgggtatcagcagcagtggctgcagaacagcagatattggtgtaccgcaaatgctgctgcctgataattcctctggaagttttgtctcagaggagtacctggccctgtgaggtgtcattccacccctactggggggtgcctcccagttaggctactcgggggtcagggacccacttgaggaggcagtctgcccattctcagaactcaagctgcgtgctgggagaaccactcctctcttcaaagctgtcagacagggacatctaagtctgcagaggttactgctgccttttgtttgtctgtgccctgcccccagaggtggagcctacagaggcaggcaggcctccttgagctgtggtgggctccacccagttctagcttcccagccactttgtttatctactcaagccttggcaatggcaggcacccctcccccagcctcactgccaccttgcagtttgatctcagactgctgtgccagcagtgagtgaggctccgtaggtgtaggaccctccaagccatgtgctggatataatctcctggcgtgccgtttgttaagcccgttggaaaagtgctgtattagggtgggagtgacccgattttccaggtgctgtctgtcactcctttctttgactaggaaaggaaattccctgaccccttgtgcttcctgggtgaggcaatgccttgccctgcttcggctcatactcggtgctctgcacccactgtcctgcactcactgtccagcactccccagtgagatgaacccagtacctcagttggaaatgcagaaatcacctgtcttctgcatcgctcacgctgggagctgtagactggagctgttcctattgggccatcttggctccaccccctattatgccaattttatagcaaagcaaactaagtcaccaaactgtaatcccattactgggtatatacccaaaggattataaatcattcttctataaagactcatacacacatatatttgttgcagcactgttcacaataacaaagacttggaaacaagccaaatgcccatcaatgatagactggataaagaatatgtggtacatatacaccaaggaatactatgcagccataaaaaaggatgagttcatgtcgtttgcagggacatggatgaagctggaaaccgtcattctcagaaaagtaacacaggaagagaaaaccaaacaccacatgttctcataggtaggagctgaacaatgagcacacatggacacagaggggaacgtcacccactggggcctgtagaggggtggggggctaggggaagaatagcattaggagaaatatgtaatgtaggtgacgggttgatgggtgcaccaaaccaccatggcacgtgcatacctatgcaacaaacctgcaggttctgcacatgtatcccagaacttaaagtatattaataaaaaaattatatatatatatatatatatatatatggagcaggcagttaattttttccttaagcaagtaattctcagaaaggtgctatttggggaaatgctaaaatagaggatgctcagcataaaggctaagtaaaagaaaaacataagaaataaaacacaatgaacagctatatacatgctgaaattttaagatctgagcttcatatttaattcaatttgtcactctgaagttaagtcaaaactgacttttcaagcaagctttttcttctgccaatctgtcaaaccacatgaaaatatagatgatgagtaaaagcaaagaaataaaatctgggctgggtgtggtggctgacacctgtaatcctagcattttgggaggctgaggtgggaggactgcttaagctcaggagttgggagaccagccgacgagatctcgtctctattcaaatttttttaaaaatttggcatggtggcaggcctgtagtcccacctactcatgaggctgaggtgggaggatcacttgagcccaggagattgaggctgcagctagctacagttctgccattgcattccagcttgggtgacagagtgaggccctgtctcaaaaataaatctgtattctgattgtaaaggtaacatatacaaaaaaaaaaaaaaaaaaaaaaccaagggtagaaaatgtggactatcaaaaaacaaatattctattataaactataccagccagagaaccctattgttacaaattttgtttgcaaaactgataccaattctggggagtctaggaagagaaaacagaaattgcaaaggtgcagaggcaggaaatcatatgagactttcaagaatctgaaaatagaaacttggaataaaaacctgaggaggacagggaaatagtagaagatgaggcttcagttgatcataaaccacctcttccagttgcagatccataaaatgtggttaccataggtaggttaattttatccatgctttactatctgcttcctttatcagcaaaccgtcattggttcatgaagactgctcctctgcagatctagccttatgatggctttctatcctcttggcaggaaaggaaaagtgacgtgtgtgtttgtgtgtgtgtatgtgtgtgtatttagtatagtacatttttagaaataacttcctattttctctaaatagaaatgactgaaaataaaatattgtttaataatatttgtaagtggattattagtttttataaatttttgtatgtttttactaattataaaataactttctcatttaaattaaaacattttaggaaaaaccagtcttaaatattattggtaaaatacaaatatcttcaagatgtaaaaatatggtctaaattacacaggtcatgtactacatttactaaatgttttaaggttgtaaactactttttttggccttttaaaaactgtcaacttgcctacttcacaaatgataaggtctaggaacatatggaagtaaccatgcccctaactatactggaaggagtcaaactctacctacacctagcacataatttaaaaaacttactaggttttacattcaggttaaaaattgctaagaattgcctttatgacacacaattgagactactgaaaatatatttatatacaaggtatataaaaacagtaaaacgtgtttagtaaaagataataagaagacatgaaaacatacattttttctaagaataaaaaattgccttacataagagaaaactgaagatttaaacaaattggagaaaaattgtaaaaatattacaaaggaaactgtatgaacatattgactaaattcaaaaagatattatatacaaacagtttttcagaccacagtgcaatcaaaatagaactcaggatgaagaaactcactcaaaactgcaaaacaacatgaaaactgaacaacctgcccctgaatgacgactgggtacataacaaaatgaaggcagaaataaagatgttctttgaaaccaatgagaatgaagacacaatgtacaagaatctctgggacacatttaaatcagtgggtagagggaaatttatagcactaaatgcccacaagagaaagcaggaaagatctaaaattgacaccctaacatcaaaattaaaagaactagagaagcaacagcaaacaaattcaaaagctagtagaagacaagaaataactaagatcagagcagaactgaaggagacagagacacaaaaaacccttcaaaaaatcaacccaggagctggtttttgaaatatcaacaaaatggactgctagcaagactaataaagaagaaaagagagaagaatcaaatagacgcaataaaaaatgatataggggatatcactactgatcccagagaaatacaaactaccaccagagaatgctataaacacctctacacaagtaaactagaaaacctagaagaaatggataagttcctggacacatacacactccaaagtctaaagcaggaagaagttgaatacctgaatagaccaataacaagttctgacattgaggcagtaattaatagcctatcaatcaaaaaaaaagtccagtaccagacagactcacagccaaattctaccagaggtacaaagaggagctggtacttttccttctgaaactattccaaaaatagaaaaagaggaaatcctccctaactcattttatgaggccagcatcatcctgataccaaaacctggcagagacacaccaaaaaaggaaaatttcagccaatatccctgatgataatcgatgcaaaaatcctcaataaaatactggcaaactgaatccagcagcacatcaaaaagcgtatccaccatcatcaagttgacttcatacctgggatgcaaggctggttcaacatatacaaatcaataaacataatccatcacatacacagaacccatgacaaaaactgcatgattatctcaatagatgcagaaaaggccttcgataaaattcaacagaattttcatgctaaatttcatgctaaaaattctcaataacctaggtatcgatgaaacatatctcaaaataataagggctatttatgacaaacccacagccaatatcataccaaatgggcaaaaactgaagctttccctttgaaaaccggcagaagacaaggatgccctttctcaccactcctattcaacatagtattggaagttctggccagggcaatcaggcaagagaaagaaagaaagggtattggaataggaaaagaggaagtcagattgtctctgtttgcagataacatgattgtatatttggaaaactccaccttctcagcccaaaatctgcttaagctgataagcaacttcaacaaagtctcagaatacaaaatcaatgtgcaaaaatcacaagcattcctatacaccaataacacagagaaccaaatcatgagtgaactcccattcacaattgctactaagagaataaaatacctaggaatacaacttacaagggatgtgaaggacctctccaaggagaactacaaaccactgctcaaggaaataagagaggacacaaacaaatggagtaatattctgtgctcatggaaaggaagaatcaatatcatgataatggccatactgcccaaagtaatttatagattcaatgctatccccatcaagctaccactgactttctttacagaattggaaaatactactttaaatttcatatggaaccaaaaaaagagcctgcatagccaagacaatcctaagcaaaaagaacaaagctagaggcatcatgctacctgacttcaaactatactacaaggctacagtaacaaaaacagcagggtactggtaccaaagcagatatgtagaccaaaggaacagaacagagacctcagaaataacaccacacatctacaaccatctgatctttgacaaacctgacacaaacaagcaatggggaaaagatcccctatttaataaatggtattgggaaaactggctagccatatgcagaaaactgaaactggaccccttccttacaccttatataaaaatcaactcaaaatggatcaaaaacttaaacataagacctaggaccgtaaaaatcctaggggaaaatctgggcaataccattcaggacacaggcatgggcaaagacttcataactaaaacaccaaaagcaatggcaacaaaagccaaaattgacaaatgggatctaattaaactaaagagcttctgcacagcaaaagaaactatcatcagagtgaacaggtaacctacagaatgggagaaaaattttgcaatctatccatctaacaaagggctattatccggaatcgacaaagaacttaaacaaatttacaactaaaaaacaacccaaatgaaaagtgggtgaagaatatgaacaaacacttctcaaaacaagacatttatgcagccaacaaacatatgaaaaaatgcttattatcactggtcattagagaaatgcaaatcaaaacctcaatgagatacaatctcatgccagttagaatggcaatcattaaaaagtcaggaaacaacagatgctggtgaggatgtggagaaataggtacacttttacacgttggagggagtgtaaattagttcaaccattgtggaagacagtgtggcaattcctcaaggatctagaactagaaataccatttgacccagcaatcccattactgggtatatacccaaaggattataaatatttgtactataaagacacaggaacatgtatgtttcttgtggcagtattcacaatagcaaagacttggaaccaacccaaatgcccatcaatgatagactggataaagaaaatgtggcacatatagaccatggaatactatgcagccagaaaaaaaggatgagtttgtgtcctttgcagggacatggatgaagctggaaaccatcattctcagcaaactatcacagatcagaaaaccaaacaccgcatgttctctcttgtaagtgggagttgaacaaagagaacacatagatacagggaggggaacatcacacacaggggcctgtctgggggttgggggctaggggagggataacattaggagaaatacctaatgtaggtgacaggttgatgggtgcagcaaaccaccatggcacatgtatacctgtataacaaaactgcacgttctgcacatgtaccccggaacataaagtatgtgtgtgtgtgtgtgtgtgtgtgtgtacaaaaaccagagaaagagcctacactaaagtttaacataggctaggtctcattcattatgatttgagatttaggcttccagctttaaagaatgttgctttaaccttctcttctccctttactttggactgttcattctgtaagtttaagtacactatcattaagaaaaaatgcacaagtcaaatggtttgttatctgcaaagggctcattgtggcatctcacctcacatttccaagccccacacacatggctgttcatgaccacataatgaccaaagtacactcagaaatagaaggcaatgtctgacttctcattggttccagtatgggaatcatccacctgcagctgtgggtccttgctgagctcaaagcacacagcaggttgggcacacactccacacacaccaacccttttccaccttttcccaggccaaacaggagccttcctgatgacactgcaggctttatccctggggggctgcttcagctccttgtacccttcaagagtgagatgctctgcccctcatccctagataaaaactgagacacaatgacagactttgtcctatgagttgtccatttactgaaaacttaatgccacttggtaaagagccacagccccaatcctctgagtatcctcctcccctaggccccatgactggcccacagtgcaactaatgcaggtttcgtgcctggtgcaggagggtctttaggacctgcacttggatgatgcctccatcctccaactagacatttgcgcaccactcacacatgaggtgagcatttagcaaatattctcctttctcttccatcatcctgccatggaccatggggtactcacaagaaagtaaaaacactgtccttctgaatgtcacagaaccaatagtcaaggacacaggtcgtgtgtgtgacacctcctatggagattgagagtgggtgagaagggaaggaccaagtgtggactcccctcctataacagattcccatagtgcaagagtttcgagatcgaagggcaaattctgaggactgctccccctacactaccacagtcaaggtttcatatttttgaagaaattgggggcctataggtaagagcaagggttctggagccaagctgcctggattccagttctgattctgcctcttacttgcagtgcaatctcagatccataacttgaagtctccccacctacgtttctccagaacaaggaggagtataaggagttcctactttgtagggttttcccagtaacagaggagttaatatgtgtgaaacctttgccctaatccccggtatgtacagggccagttaggggttgcaccacagaatggggaccgtccttatgggacactaacctgcattcattttcaactctgaagtgctgaaaacaagacctgaggatgtgaaaacagagaaattcacccagtgagaacggttttataaaaatagggaaataacaaaagaacagagaacccttgtgtgtggaatgaatatgcaaattacaattttttttatgttgttgtctggtttgcttttctttttttctttctttttgtggatacagggccttactctgtcacccaggctggagtgcggtggcatgatcagagctcactgcagcctcaaactcctggactcaagtgatcttcttacctcagtctcccgagtagctacaaataaaaatgcgcacaaacaggcttggctagttttgaatttttttggtacatacaaggtctcactactttacgcaggctggtctggaactcctgtccccatgcgatcctcccaactcggcctcccaaagtgctcggattacagccatgagccacagcctctggcaagttgttgaatagcatccactgtaagctcttcctgaactaaagctaaactggttatttctctgttttggatgattctgtctctaaaaccatgtcccccaatgtcattccctagtaagccagaatctgctcaccctcttctcccagaacgggatagacagcttgggctgggagacagagagagacctgaggctggaggcagaagttggtggtccctctgtgcagatcccacctgaagaaacagccccaatagactgtgttcttcttttccactctgcttggaaagagtcacctgaggatttatgcattcagctctcatgaatgctcagagacgagtccccggtaactcatgatccccaagatctccactagttctgccacccgggatccacattgacatatgtgggaagatgcacagctgcttcatcagaggcgctactgtgtgaggaggaaccttcccatgcacagaaggccacatgcatgttcacagctcaacacccagtcacatcgcagcacacacacccacagtcacacagagccacgccaatcactgagtcacacaggcctgctcactgtgcatataaagatgctcatgcactggtatggctgtgttcacactcacacatcacagtcatgaagacaaagcacaatcacccccttacattcactcacacactcccccatcctggtgggctaatcatgtcccacctaaagtcacatcgtctcagcagagtttcctctcctcagacatcatcacatgcccacagagggttacactgatccagggttcacacaccacaccccacaagcatctcagataccattaccccagtgtctctcttccacacccctaccattctcagtaaatcattcacaatggaaatgttcatattttcatctcataaaatctctctttccttttttagggtgacctgagattattgaaggctgtgccttttcaactcatgggtaacagtgatattgttgtctccctctgggtgactcttctgaattgtgtccagtattctgtgtgaatctcttggagttgaagcatttaaatgatccctgtcagccctgccctttggcttcattcctgattccagccaccttccagcaagattcccctgcagagtgagaagggatggagtgtcagaaacagactcagtcacaaccacacctgtttgcaaccctatgtctgtgatgcagcagaaatgacagtgatgggggtaccaggggaaggaaggggtcaccagggtaatgtgcagatccggatgatggagttagggtgaggggttgtgaagtccagcctccatgcttctcatgaagcctttcctccactgtgcagaattcacctggaatgagtgaatttttctcacttgtgcgatattttaaaaatgggaattcttaaggcaaaacagccagccctggaaaaaaaattctctcattctcttccagaggttctgggagaccatagaccttgatcctcaacaggacctggggagagaggtatagagagtctctgtgtcatcctgactccatccaggccccttgcctttgccaggtgagggccattcatactccatctctcacacacctgggctccatccacactctctcatttttctctgggtgtccatgtgcaataaaatctcagagactcagattctgggagaaaggtgagattcctaagtctagcgcttgatttgtgtgctacttagctcaaaacctgcatgaagacagggacaggggcaggtgatcagacttcagctacaacgcagtcttcacttggggtggaggactcaggacccctcctcaagttctctttttgttataacagaaaacatccttaaaatctgtataggaatttaaagaagaaatgaattcaaatccctctccctccctcctttctttttattttactcttcagttttattgactgtgaatttaaactatttttgaaaacttcatccaagttaacaaaaaatgtatattatgataaattcatgattaaactagcactcatttagccaccacaattgtactcgtggcttgttgctaacacacatggactcctatgtgtcccttccctatcacgtgaccttcttgcccctactggcaaccatgctcctgcctttcttttttgctttgctttcgtcttattactttgtttaattttgcctgtaggtgtttatcttggattttttttattgggtcatgcatcttttctaaaacatttctgtttttaggattcatctatgttgccgtgtggagctatagatccttccttttcacttatctccactctggagttttataaattggccaagacatactcagcagtttactcttgatagatattgaatgacttctagcttgaggctattgaaacattgccttctctgcaaaattatcctgatctcctcgtgccgataatttcttatttcaaggagagtggccaaaaagccaattgaatccctgaaatgtcaagaaagtgtctgcctttctgactggtgaatagaaataaattgtccaaaataaacacagagacctactgggaagacagggatcaagacactctgaggattaaagtctttaaagcatttcagatggagggggctggcccagaattctccccaaatgagacactccagggagaacatttactctcgataaggctggggcatccggaggggttttctgagatcaatggttaggatttactgggtgaggggaggcagtggaaatggaggtgtcctaaccttgtgtctgtgggtggagatgaatgaggcctacaggagagaccatcagtgagagctgtcattgtgtgccctgatcaaagggtttgccttctatccgtctatgaccaagatttacactctgtaaagtagtatctccccttttcactgtttgagcctacagcttcttctctgtgagtgactttttcctttctcggtttgcaaagaggatgggagaagggcatggtcacccatgagcattctttaaatgaacaaatcagatttctgcatttgggctctacctttcgagaaatggtgttgtataccccttgttcctgaactgaggggacgagcatatgagtttctttctctggagattttcttcttggcatttttcctagtaaagtgaagggacatatgagatttggagttcaggtagggtaatgggagcccccaagtgttcttactcctctgttttcagtgtaaagagtgaggttcctactcagttctgctcagctcagacccagccccacccaccctgtcatggatcagttattcaagcccccaatcccattgcttacacctcagtgactcatatgaaattgggtagggttggttcagagtgtctgacatatagtcgatgctatagaaggatgtggttgctaatgccttctcagacatttcagtggccttttcacttactttttgtgtctcaggaagatttatcctccttgacttgttcacaccatctataaaatcccccaagccctcttgatgatgaccactttttctccccatgaaagcaagaaccaaattctgtgaagtttgattaagttttaatgagcaggagtaaggattgaagtgagaaaagatcatgctgttagctggctttggaatcccaagttcacgtagagacagggattccttggcaacatgaagtctggttatctctttaaatagctgacattaaatttggtcagggagatatctctccacacttgcaccatcttcacagcctcaggcttgattctatggtcaaaggtgtaagaggattggccattgaccattacctacagaaggaaaaaaatacatcagaaagacagtatttcaccaaacaagctttcagcctgctctctatggtgtcatagtacctgaaacatccaaccagaaaatgcctcattatatatctgaacccagtagacacacttcttttttacagactacctgttgtaactatctgagacagttgctcactgtattttcaatgtttcctctcatttctccagtgaggctctgtcactctctgtcacatgggccatatttgctcagcctcccctctatcctggaagatctccaaggccagggactgtgtttcataaacttgaatccctgcatcttgcacagggccagccacagggtaagtgctcaacaatgtccactgaatgcacacatttcagttacataaattatgactgctatttgctgctgatgacccagtttctctctggaattgctcatatttgagctagtggcggcaaggaatgtaactcaagtgttcttagagaggtggggctggattaatgttacaaaacataggatattatctttatttatttttttatggttattaaattatttatttattatttattttttttattatactttaagttttagggtacatgtgcacattgtgcaggttagttacatatgtatacatgtgccatgctggtgctctgcacccactaactcgtcatctagcattaggtatatctcccaatgctatccctcccccctccccccaccccacaacagtccccagagtgtgatattccccttcctgtgtccatgtgatctcattgttcaattcccacctatgagtgagaatatgcggtgtttggtttttttgttcttgcgatagtttactgagaatgatgatttccaatttcatccatgtccctacaaaggacgtgaactcatcattttttatggctgcatagtattccatggtgtatatgtgccacattttcttaatccagtctatcattgttggacatttgggttggttccaagtctttgctactgtgaataatgccgcaataaacatacgtgtgcatgtgtctttatagcagcatgatttatagtcgtttgggtatatacccagtaatgggatggctgggtcaaatggtatttctagttctagatccctgaggaatcgccacactgacttccacaatggttgaactagtttacagtcccaccaacagtgtaaaagtgttcctgtttctccacatcctctccagcacctgttgtttcctgactttttaatgattgccattctaactggtgtgagacggtaaacgttagacctaaaaccataaaaaccctagaagaaaacctaggcattaccattcaggacataggcctgggcaaggacttcatgtccaaaacaccaaaagcaatggcaacaaaagacaaaattgacaaatgggatctaattaaactaaagagcttctgcacagcaaaagaaactaccatcagagtgaacaggcaacctacaaaatgggagaaaattttcgcaacctactcatctgacaaagggctaatatccagaatctacaatgaactcaaacaaatgtacaagaaaaaaacaaacaaccccatcaaaaagtgggcgaacgacatgaacagacacttctcaaaagaagacatttatgcagccaaaaaacacatgaaaaaatgctcatcatcactggccatcagagaaatgcaaatcaaaaccactatgaggatattatctttaacagcgtataaacatagaaaaacacctctgactttaatctgaataaaatgtgaatgttttggcctacccatttgaaatgtcagaaactttgatcacattctttattactgaggctacacagggagtcatattttaggtttcattctcaaatttaaaatccatacaactttgaaccagttattccttttctttataatcatgttccaatataaatagggaaaagttggcaatgaaaaaagggttgattagaaagcttaatacagtaacatttgtgagagcaaaacattggaaaccaactcagtgctcttgtaaagggtcaagtacagcaagttgaggaaatccttctaggggaatattatgtaatccttaaaaaaatgaggcagcaccatggatagattatttctccaatatatattctttgagtacaactcaactgtcattcctaaagtgtaatgtgtagggacattgataccagcatttgtttaaaaacaaataaaagtgtatatatgggtgtatgtatatgcttctataaggatagactatggaagaagagtagagaagctagtaatattgttctgaggattgggattgaggagtgagaagtcttcatattggactgactaaaacaattttattcatgtgtatatcttatccatttagctacatgaaaatttaaataacatcataaggggaagatagaggatattctccatttggggaaaatggcaagtgaaccgacattgaccctggtcaggtatgggaaaagagctgaggatggcagtgcaaggagaggtgatggcagagcaagcaacaacacctgttgaatgagagagggaaatgataaaagtaaagggaacccctgtgtgtgtgataaaaagcctgggacagggggagttatgggtgatgaaaagcctgggataaggggagttgtgggtgatgaaaagccggggacagagggagttatctggagttagggcatgaagagctgcctcctgctctgagatcccatggaagccgggtgcggggagctcctggggtgctcacctggtacttatctggcagcactgagatgctcagttcaaattcttggccatcctgaaagggcatattcttggattccacctgctgcttccaggccccatactcacggctgttcatgaccacacgacgaccaaagcacacttggaaatggaagacaatgtctgattcctccttcatctcagtgtggaaatccacctgcagatatggttcattcctgagggcagagcacacagtgttgagcaggtccctttcttgtggggcacacacaagacacacacacaagtctctttgccccttccgtggtcgagcaaagacttgttggtattctaggccttgtcattgtggggctgcttcagctccttgtgttctccatgggtggaaagagatgctccagccctcatccacagatggaaactgagccatagtcactgacttggtcatatgaattgcccattttctgaatattctatgccttttaatagataaagtgtcacagccccaagccttgagtgtcctttactcctagacccatgactagcccccagtgcagctgctgtaggttttgttcctggtgctggagggtctccaggacctgcacattcatggcacttccatcctgccaactagactttccacatgattcacacatgaggtcacccccttagaaaatattcttcctcttctccacctcccatctttgcaccatggagtactcacaagaaacaggcaagtggtcgccctttgattgtcacagtagaaccagtagacaaagaggcagcctctgtgtatggcacctgccaggggattgagagtgggtgagagaggcagggccaggtgtggcctcccctcctgtaacagattcccatggtgcagccagttagagatcaagcagtagactcaggcctccctgctcccaccctacctcagtcaggaccccgtatttttcaaaacaatggggcccatggttaagagcagagcttcagaaactgagctacctcaattagatcctttattgtgctgactactagcagtgagatgttaacatgttttgaaccttttttttagacagggtctaattgaatcacccaggctgtagtgaactggcacaatcacagcccacttcaacctcaacctcccaggctcaagccatcctctcaattcagtttcttgagtagctgagactattggtccacacccagctaattttatacgtatttggagagttggggtttcacgatgttgcccaggctggtctggagcatctaggctcaagggatcctcttgtctcagcctcccaaactcctagattacaggggtgagccactttgcccaaccagcaaggggaccttagatctattgcttaaactctccctgcctcagttttcccaatacaaagatgataatccgaaatacctactttgtatcatgttttcagttatacagtagttaatagatgtaaaccctttagcctaaaccctggcacgtatagggcctgttgggggtcctctatctgaacaaggagggtccttgtggaacactgacctgcgatcatcttcaactctgaaactgtgaaaacaagatgtgaggatgtaacagtagagagattcactccagtaagaaacaacaactttgggttagtttcaatttgagaacagctacaaataatgacactataaacatttctgtataggattttccataaactaaagtgtttacttggctaaaatctggtgagtaaagtgtttctgtttgtttggtgattttatgtttaattttatgggaataccaaacgattttccaatgtagctgtatcattttacatccctccaagcatcgtttgactgtttcaggtactctgcatcttttctaacttgagattgtgagttttattttttattatcattttaaccaccaaaaaaaaaaagaaagaaagaaacaacacttgttgaaagagagagggaaacgaacaggaaagaacaggaaacccctgtgcgtgggaggcacatacatcacaatcatcatgggcaatggacgtccttcccagaaggggcacacattgctgagagcacaaccgcagtacttgcacaaatgaagattgtgggtcagggaagttattggctagaatctataaatggatggtatttttcttttttgaaacagggtcacactgtcacctaggctggaatgcagtggcaccatcaaaactcactgcaggctgggcgtggtggctcacgcctgtaatctcagcactttgggaggccaaggtgggtgcatcacttgaggtcaggagttcgagaccagcctggccaacatggagaaaccccatctctactgaaaatacaaaaattagccaggagtggtggcacaagcctgtaatcccagctactcgggaagctgaggtatgagaatcgcttgaacccgggaggtggaggttgcagtgagccgagattgcaccactgcactccagcctgggaaacagagcgagactctgtctcaaaaaaaaaaaaaaaaaattactgcaggtttgaaggcctgggcttcagtgaacctcttgcatatgccccccagcagctggaactacggtatgcaacaccacattcaataaatttttaaatttttggaaagatgaaatcttgctatgtctcccaggctggtctaccagtcctggcctgacatgggcctttcaattcggccacccaaagtgctgagactacaggcctcagcaaacatcttgatgaatatccactgtaagctctgccttgtaccttcctggttttgggtgattcagtctcttaaatcaagtccctcaatgtccttctctagcatcctggcactcaatgggaaggccaggctagggtaggagacagggagagacctgaggctggaggcaggagccagtggtcactgtgtgcagattccacctaaggaaccatcagccccatcgtctgtttctcacccccattctgcttgggaaaaggcacctgagaattcatgcattctgctctcataaatgctcagagataagtcctcggtaactcaagggccccaagatcccacaagttctgtcaccggggatccacagtgatgcacaagggaagttagacagagtactgctatgtggggaggaaccttcacatgcacagaaggccacatgcatgttcccagttcaacacccagtcacattccagcacacacactcacagtcacacagagccgtgccactcactgagtcacacacacctgctcactgtgcatataaagatgctcatgcactggtccggctgtgctcacacacacactcacatcacagtcatgaagacaaaacacagtcacctgattacaatcacttacacacccacccatatcctggagggccatacacatcccgtctaaagtcacatcatttttagcagagtttactctcatcagataccatcacatgctcacagagggtcacaatgttccagcatccacaccccctacccccctaccccaggagcatctcagataccatagccctagggtctctcttccacacacccacaactctcagtaaagcattcacagtagaaattttcatattttcatcccataaaatctccctcttcccttttctgtgtgacctgagattattgaaggctgtgcctttttaactcacgggtagcagggacattgttgtctccttctgggtggctcttctgaattgtgtccagacttctgtgtgaatctctgagctgcagaatttaaatggcccctatcagccctgcctctggctttattcctgattccaagcccctcccaggaaggtttcctcacacagtgagaaggggtggggtgtcagaaacagactcagtcacaaccacacctgtttggaggcctgtgcctgtgatgcagcagaaacgacagtgagggaggtactggaggaggaaggggtcaccagggaaatgcacagataaagacgatggagtgaggatgagtggtgtgagttccagcctccatgcttctcatgaagccttttctccactgtgcagaatctaccaggaaggtgtgcgttctcctaacctgtgcaatggtaaaaagctggagatcctgggggcaaggcacttggctttgaaagaaaatcctcctcctccttctccagtggttctgggagagcatagatcttgatcattcgcaggacctggggacagaagtagagaaaacacttgtgtcttctttacccaccctcagatcccttggctctgccaggtgagagccactcccactctgtctctcagacacctgggctttaggtacgccctcttatttccctatttcttttcatgtgaatcaaaatctgaggctgtcgttctcctgcagattcttggagaaaggtgagatttctcactcataagtgggagctaagcgatgaggatgcattagcattaatattagttgtgcttgacccgacaataaattccactttccctgatctaaaaccttgacaattcatttccaagcatgcactccaagattctgctcatataaatcagcacaatcacacagttcttttggtatataacgtatttccttaagattaatttgtaatgtcatcccactgcattccttgggttttgactctgggtatggacatggaagcaatgaaaagggtcagaggccacaattaaggagctttggaaaccccgttctaggcaaccaccctcacaccctgcccagaactgtagcttgtaagaaattaccacagaagggaaagaggaactgcttttccttgcaacagatatgcaatagaattttgagtaatatcccagctattcatctgaactggggaagaaatatcagttcagggcgtctggccacctagtaagctgtggataaagatgttgatgttatttacttctcaggcattccagcaatcctttcagtgatgcagagagattgatcttctttaacttccatatcctctgcacaatagcccatacttctgctggttgcaactatttcttcagaaatccattatgccctacgacttgctttcagtctttcttttcaactacatctttccaagcacacactgttcccccgaaaaactttaggttttgtgtatgaaattatataatatctgggatttgctctaaaataatctggggatgacagttctctccttttgcaaacatttgaaattttttacagtacagtttttaattaagtagccagtacatagactatatataaaagaaaaacaaaattatcagtactggcatggctatatcttcaagaaatgctgtagtatgaaaaggcatgaagaaaacatgcataatacgagaccaattattttaacgacaaaaaaataaaattgatctcataagtacacacaaacattcataaatgcactagaaaatgtcaaaagaaggcattccttgtagggggggacactgggtttagaagaaatgaggtcaaggtataaatctgtaatgtttgaattttacccacaagaaggtattatattacttaaatgatttgtataaacattttaaaaataaaggtcataatacagttaaaatttttaaaaaatttaatcacagtttggaacccagcaaccatgcttcttgttacagagcactctttctattttgtgttctgtttttcctgttcctccagcgatgttctaacactctatacagcaaggtgggtttgctcagtcacctctctatcctggaacatccctgcaccacataaattgcctgtcacaaggtaagtgctcaataaatattcattgaatgcataactttcagtgccatggttttatgccatgtagtgataaccggtgttttcttttaagaagatccgcatttattccctttctccttccctccctcccttcctttcttttatacagaaacatcagtgtgattcctggcctttgtctttccatcacactcttcacatgactgacaggacaaccccatgcctctactctcacagaatagccatagcatggccacttctcattgtctgccagttcactgacagcagctttgtgtttactactaagtgtctggctcacagcagatgctcgataactccatttctaagaaataaatatctcttcctgtaacttcttcctgcaattcaaaccagagagtatttctcaggaattatcagttgattgagtggcaaggtatgtctggactatgcatttcatttgaatctattaatagttttatggctagaagagaaaatgaaacaaaaatggattttcagctgggtggaaaagttcagtcagtagaacaagtgagggaacattctggggaacagatgcagagtgtgggcaggctgtcattatgagtgtgacagtgtttaccagctgagctgacctttgttctgatgaaaatcttgtaattcactatccaaatatcaattatatctttgacatacaaaaaaaaccatcgtatcattcttatgcctttgcatcctcatagcttagctcccacttatgaatgataacatacaatgtttggttttccattcctgagttacttcacttagaataatggtctccaattttatccgggttgctgcgaatgccaatagtttgttcctttttatggctgagtagtattccatggtatacatatacaccacaatttctttatccactcgttgattgatgggcatttgagctggttttatatattttccaattgcaaattgtgctgccataaacgttgtgtgcaagtatctttttaaaataatgacttattttcctcggggtagatacccagtagtgggattgctggatcaaatggtagttctacttttagtttcctgaaggactctccacactgttttccatagtgtttgtactagtttacattcccaccagcagtgtaaaagtgttcccttttcaacgcatccccaccaacatctactatttatttatttatttttttattttggccattcttgcgggagtaaggtggtattgcattgtggttttgatttgcatttctctggtcgttagtgatgttgagcattttttcatgtgtttgttggccatttgtttatcttcttttgagaattttctgttcaggtccttggcccactttttgataggactgtttggtttattcatgatcatttgtttgagttccttgtagattctggatattagttctttgttggatgtaaaggttgcaaagattttctgccactctgtgagttgtgtgtttactctcctgattgtttcttctgctgtgcagaagctttttagtttaattaagtcccatctatttatctttttgcttttgttgcatttattttagagttattggtcatgaggcctttgcctaagccaatgtccagaaaggtttttctgatgttatcttctagaatttttatagtttcaggtcttagatttaagtccttcatccaccttgagctgatttttctatgagttgggagatgaggatccagtttcattcttctacatgtggcttgccaattatcccagcaccatttgttgaatagggtgtcctttccccactttatatttttgtttactttgtcaaagatcagctggcagtaactatttgactttatttctggggtttctattctgttctattggtctatgtgcctatctttgtaccagtaccatattgttttggtgactatgaccttatattaacagtatagcttgaagtcaggcaatgcgatgcctccagatttgctctttttgctgagtcttgctttggtatgtatactcttttttggttccatatgaattttaggattgtttttcctagttctgtgaagaatgatggtggtattttgatgggaattgcattgaatttgtagattgcttttggcagtatggtcattttcataatgttgaaattttcacatgggatgctagagcatgggatgtgtttccatttgtttgtgtcatcaacaatctctttcagcagtgttttgtagttttccttgcagaggtctgtcacctccttggtgaggtatattcctaagtattttatttattttatttttgtggctattgtaaaaggggttgagttcttgatttgtttctcagttagttgctgttggtgtatagcagaactactagtttgtgaacattaattttgtctcctgaaattttgctgaatttatttttcagttctaggagctttttggaggagtctttaaagttttctaggtatacaatcttagcatcagcaaacagcgacagtttgacttcgtctttactgatttggatgccctttatttctttctcttgtctgattgttctggctagggcttccagttctatgttgaatagaagtggtgagagtgggcaccattgtcttgttccagttctcagagggaatgctttcaactttttcccgttcagtattatattggctgtgggtttgtcatagatggcttttattactttaaggtatgtctcttctatgactattatgctgagggttgtaatcataaaggggtgccggattttgtcaaatgctttttctgcatctattgagatgataatctgatttttgtttatgtggcatatctgtttatgtggcatctaattctgtttatgtggcatatcacatttattgatttgtgtatgttaaaccatgattgcgttttttggcatgcagggatgcagtgggtttcacctgattgtggtggattacctttctgataagctgttggatttggttagctagtattttgttaagaatttttgcatgtatattcatcagtgatattggtctgtacttttctttttttgttgtgtcctttcttggttttggtattagggtgatactggcttcacagaatgatttagggaggatttcctcctatcttatcaatacaatttgtaccaattcttctttgaatgtctgatagaattcagctgtgaatccgtctggtcctggacttttttgttggcaattttaaaattaggatttcaatcttgctgcttgttattggtcttttcagagtttctaattcttcctggtttaatctaggaaggttgtatatttccaggaatttgtccatctcctctaggttttctagtttacgcacagaaaggtgttcatggcagccttgagtgatctttttgtatttctgtcatactggtcaaaatatctcccatcttatttctaattgagcttatttgggtcttctctcttcttttttggttaatatcactaatggtccattaattttatttatcttttcgaagaatcagcttttggtctcatttaccttttgtatttttttttgtttgtttcaatttcatttagttctgctctgatcttggttatttcttttcttctgctgggtttggctttggtttgttcttgtttctctagttccttgagatgtgaccttagattgtctatttgtgctccttcagactctttgatgcagacatttaaggctatgaactttcctcttagcactgcctttgctgtatcccagaggtttctatatgtttttgatatgttgtgtcactattatcattccattcaaagaattttttaatttccatcttgatttcattcttgtcccaacagtcattcaggagcagggtatttaatttccatgtatttgcatggttttgagggctccttttggagttgattttcaattttattccactgtgttctgaaagagtacttgatagaatttcaattttcttaaatttattgagacttgttttgtggcctatcatatggtctatcttggagaatgtttcatctgctgacaaatagaatgtatattctgcagctgttgggtagaatgttcaaatatctggtaagtccaagctatagttcaaatccattgttctatcggccactgaaaatatacatacacatttattattgcaatagcaaaatgctataagctgggttgaccctataaaatcttccttttctgggaaaaaatccattaataatttcaaataacaaaataaaaatggacggacagttaataaaactataacaagagaatcttggtagtcattttttcttcttctcttccaatcacattaaatcttcaatccaagatatacagtttgctcttcctttaaaacttattaatattctgaccaattctaccagctctacttccacagtgccaaccaaacaggatcaaatgcatctaatggttttttttaaagggagtagtttgactgccaggacctactgaggccaacaatattaagaaagcttctgaaaatactgtaaaagaattttctttaaatagtgaaccaaaaaagcccttccatttgtgtagttgctttgacaaaactgcaaactcaccatcaattaaaactgtaaatatggcaataaaggtaagtccatcttttcgtcttattcttctgttagctgtgactccatttcttcgcttcctcttgccgcaaatctccttgaaagaagtgcctattccttaagcattactactaataaaatatcaaaaaacaacagatgttggcatggatgcaaagaaaagggaatgctaatacactgttggtgggaacgtaactggttctacctctatggaaaacagtatggcaatatctctacgaattaaaaaaagacctaccattccacccagtaatcccaatactgggtatatacatcccaaaaaagaaataattatatgaaaagacaccttaactcttatgtttattgcagcactattcacaataggaaagtcacagaatcaaagtaagtgtccatcaacagttgattgaataaagaaaatgtgctacatatacaccagggaatactaagtagccataaaaagaatgaaattctgtcctttgcagtgacatggttggagctggagactattatcctatgtgaactaactcagaagcagaaaatcaaatactgcatgttctcacttacaagtgggaggtaaacgatgggttcatatggacataaaaatagaaataacagaccctgggggcttgaaaatggggcagagagaggaggaagtgagggttgaaagattacctattgaacacaatgttcagtatttgagtgatgggtacaccagaagcccaagccttaccattatgcaatacactcaggaaaaaaacacgcacatgtgtccccaaatctaaaattaaaaaaaaaaatttaaccctctttatggagggttcaaaggataaaataaagtataactatacaagctttcatataataatagatgaaaacatatatatattgattactcaaaaggaaaaaagaacaacatagtcttactttcttctaatatctttattcatctcccctcaaactcagtctgaatggccttctatccttccacctcatagaaatgattctgttaaaggcattaatggcctgcatattgctaaacacagtggtcagcggtcaggcctcatcttacttaacctgccaggtgattattccttcctccttgataaactttcttcacttagctaccaggacactgaactatcttggtttcttctcatctcactgtttgctccatctcagtgtcccttactgcttcctctttttctcctgacttctttatcttggatcgacccaatgctgtttctcttcctttttttagctgtacttacgcccttggtgatggcaatctctcaaatttgaaatgttatctatttgttacaaccctccaatttgtatccccaatccaaacctctctactaaactctaaacccatatattcaactctctgcacttggacataaaaaagcatctcaagttcaagattcccaaagctgagcttctgatatccttcccccttaaacgtgctccatccacagctttgccaatctcagttgatggcttcttcaacagtgcagtgccttgggccaaatcctggtagttactctcaattcttccccttttatcacatcccacatccaatccaccaggaaatacagtttgcacttttttttaaaacatatcaatattctgaccaattctaccagatccacttctatgatgccaaaaaatcaggattaaatacatctaatggttgttttcagagagagatgtttgtttgtcaggacccattgaaaaagaaatgccactgatgtattttctgggagccagtatttctttcctgatggctgccataaggacccttctattgttctacactccagggaacataatgcaatcaatgtgtgcataagtaaacctaagacacaggtgaagatgtaaagatgattttgttagtttgaaagccaattacgaaggcagaggagcaagatggtggaatagaaggctccactgatcatcccccatgaaaggacaagaggataacaagtacctgcctggaaaaaacaccttcataagaaccaaaaccaggtgagcactcatagtacctggttttaacttcatatcgctgaaagaagcactgaaaatatagcaaaaacagccctgaatcaggggcatcatctccgcccaccaccaccagcccccccaaacacactccctggcagcaacagcgtggtacagagggcatctctgggcggtggcagaggaagaacagcaattgtgaggcaatggactcagtgctgtcctgctagactagaaagaagaactggaccaaactcggctgatgcctgctctgaaaggtaagctccaggccaggcaacatccactacaagctgacttaagggcttttgggtcctaagggaacatcagtggtagactggcagtactcctcatggcctggggaggcaatagctacagaatcaggcttctctgcctttggaaaggggacagaagagtgggaaggactgtgtcatgtagtttgagtgccacctcagccacaatataatagaacactaggtagacttctaaggtttttgagtccagtccctgactcccagatggcacttctggacccacctggggcctgggagatctccctgatcttatgggaaaaacacaggcctggctggctttgccacttgctgatattagagccccagggccttgagcaaacataggcagcagcctggcagttgttacagcagatgtgggtggagactcagtgctgtgctgccatcaggtatgacccagcacacttatagtggtggtggccacaggggtgtctgtgatacgtttccctcagctccaggcagctcagcacggagaggctctgtatgtttgggagaaatttagggaagagaacagagtctctgcctggtaatccagagaactctcctggatcttgtccaagatcatcaaggccatacctccaacagtctgtaaggacacaaatctccttgaaagaagtgcctatcatgtacgtttattgcggcactattcacaatagcaaagacttggaaccaacccaaatgtccatcaataatagactggattaagcaaatgtgggacctatacaccatggaatactatgtggccgtaaaaaaggatgagttcatgtcctttccagggacatggatgaagctggaaaccatcattctcagcaaactgtcacaataacagaaaaccaaacagcacatgttctcactcataagtgggagttgaacaaacaaaacacatggacatagggaggggaacatcacacactgcggcctgtcggggagtgggggactatgggaaggatagcattaggagaaatacctaatgtaggtgatggtttgatgggtgcagcaaaccaccatggcacgagtatacctatgtaataaaactgcacgttctgcaaatgtaccccagaagttaaagtataataataacaaaaaagaaagaagtgcctatttcttgagtattatcatgttattaggcttggggcatccagtgaagtatatacagcttaggtcaccacacccaagtcctttcaaatatctggaaagccttcccaggaaggatggctacaaataagcacagccagtgaaaactacaataaacacctaaccctccaatgcatagacaccaaataacatctgctagcattaacaccaaccaggaaaacatgacctcacaaaatgaactaaataagggagcagggaccagtcttggagaaacacagatatgtgacccttcacacagagaattcaaaatagctgtgttgaggaaactcaaagaaattcaagataacataagaggaattcagaattctatcagatgtatttaacaaagagattgaaataaaaagaaagccaattaaactgctccattgacatgtttccagattcagggtctataaaccacttttttcaatgattgtatgaagcagaaagttgatgtcaaggtgaccagcagcgacacccaggtaccacatcgagggctttgaattaactttcagcagagtcaatcccagtgctgtcaagcaaataaaaatagagtgaggccaacaatctcaagaatacttctgaaaatgttggaaagaattttctttaaatagtgaataacaacaagaaaaaccttccatttgtggagttgcttcaataaaactgcaaccccaccatcaattaaaagtttaaggccacaacaataaagaaatgtccatctcttgatctcattcttctgctagctgtggcctcatttctttgcctcctcttgccacaaatctccctgaaagaagtgcctatcctttgggtaatattcaagagtcaaaaaacaacagatgttggcatggatgcagagaaaagggaatgcttgtacactgttcgtgggaaggtatatttgttctacctcgatggaaaacagtgtggagatatttcaagggatcaaaaataaagctacattttgactcagcaatcccactattgagcacctacctaaaggaaaaaaatgattatataaaaaagacacctggactcttatgtttattacagcactattcacaatagcaaattcatgggaccaacctaagtgtccatcaacagttgactggataaagaaaatgtgctacatatacattgtagaacactatgtagccataaaaagaataaaatcttgtccttggcagcaacatggatgaagctggagtctattatcctaagtgaactaactcggaagcagaaaatcaaatactgtatgttctcacttatacgtgagaggtgaatgatgggtacgcatgaacataaaaatggaaataatagacactggggactccaagaggtgcaaagagatgggggagtgaggatcaaaagactgcttattgaacacaatgttcagtatttgggtgatgggtaccccagaagcccaatccctgccattatgcagtacacccatgtaacaaacatgcacatgtaccccctgaatgtaaaatgtttgaaaaaaaaaaaagaatcttgaccttctttatgcagggtttagaggataaaatcattaaagaatatgcaagctttcttatagtaatagatgataaaatcatatcgattactcgaaaggaaaaaactgcctattcttactttgttatattttcttcattcatttcttttttttattatactttaagttttagggtacatatgcacaggcaacctacagaatgggagaaaatttttgcaatctactcatctgacaaagggctaatatccagaatctacaatgaactcaaacaaatttacaagaaaaaacaaacaaccccatcaaaaagtggcgaaggatatgaacagacacttctcaaaagaagatatttatgcagccattcatttctttttaaactcagtctgaaatggccttctctccttccacctcatagaaatgatttctataaaagtcgttaatggcctgcgcattgctaaacataatggtcggttatcagtcctcatcttacttaacctgccagttgattattctttccccttgataaactttcttcacttagccaccagcacgctggaatctcttggtttcttgctccatctcagtgtcctctactgcttcctccttttctcttgacctctttatcttggattgaccgatgctgttccccttctctttttaagctgcacttactcccttgataatctcaacctctcaagtttgaaatgttatctgttacaggccccaatttacatccccaatttagacctatctactaaactctaaactcatatagtaaactgtctgcacgtggtcatacaacaggcaagtcaaattcaagattcccgaagctgatctcctaatagtcttctcctttaatgtgttccatccacagctttgccgatctcagtttatgaattctttgctcctccagagtcttgggcaaaaatcttggtagtcattctttattctctttttatcacaacccacaaccaattcaccaagaaatatagtttgctcttcctttaaaatatatcagtattctgatcaattctaccatggtccacttccaggatgccaacaaaacaggattaaatacatctaatggttgttttcagaaagagtcgtttgttttctgggacccactgaagaaatgccactgatgtaccttctgggggccagtatttcttacccgatttctgctgtaaggactctcctattattctccactccagggagcatcacacaattggtgtgtgcataagtaaacctaagatacaggtggaaatgtaaatataattttgctagtttgaaagccaattacgaaggcagaggagcaagatggtggaatagaaggctccactgatcatacccctgcaaagataccaggttaacaagaatctaaccaggaaaaaaaaaaaaaacaccctcagaagaaccaaaaatcaggtgagcactcgtaggccctggttttaactatatattgctgaaagaggcactgaagagagaaaaaacagccctgaatctcaggcaccacctcccccggcactccctggcagcagcagagtggtacagagatcttctctgggagctgggagaggaagaacagagcagtcgtgaagcactgaactcagtgctgtccgttagagcagaaagtaaaactggaccaaattcagctgatgcctgctcatggaggaagcatttacactagcgctagccagaggggaatcacagatcccagtgatcttgaacttgagtgaacttgagtgtctgcgaatctcaccactgagagctacagcattctgtgtctccaagtaacctggaaaagcagtctaggctgtaaggactgcaactcttaggctagccctagtgctgaactagggccagaaatagcggacttgggatgcacatgacatacaaaaacaccagcttgggcagccaagggagtactggcatctcctccccaactccaagctgcacagctcacagctccaaaacagacccctttctttcacttaaagagaggagagggaagagtgggaaaagctttgccttgcatctaggatatcagctcagccacagcaggataggacattggttggagtcatgaggcccccgttccaggccctagctcccagatggcatttctagacacaccctgagccagaaggaaacttgctgtcttcaaggaaaggacccattcctggaagcattcatcacctgctaactgaatagctatttatcaccttggaccccaaataaccagcagtgatacccaggtactacgttgagggccttgggtgagcctctgagacctgtgacttcagaagagactcagcacattcctgtctgtggctgttatgaggcaaggctcctgcttgagtaaagcagagggaaaagcaagggggacttggtcttgcaccttaggtaccagcatgaccacagggagtagagcaccaatcggggtcttagagtcattgactcggacttgactcttgaacagcaattctgaaccagccctgggccagaagagagcccactgccctggagggtgagccccaggccaggcagcattcactacaagctgacctaggagctgttgagccctaagagaatatcagagggagtctggcagtattccttgtggcctagagtggcagtggctatggggtgaccactgcctttggaaagagcaaggaagagtgggaaggactatgccttgtggtctgagtgccagctcagccacaatacaatagaacaccaggtaggcttctaaggtccttgactccagtccctgactcctggatggcacttctggacccacctagggcctgggggatatttgccacctgctgatattgagccccaggttcttgagcaaacataggcagcagccaggcagtggttacagaaagcctttgaggagaccaagtactgtgctggcttcaggtctgacccagaacagtcatagtggtggtgaccacaatggtgtttgtgtcaccttttccacagctccaggcagcccagcacagagagactctgtgtgtttggtagaagttaagggacaagaacaagagtctctgcctcataactcagagaattctcctggatcttgtccaagaccatcaatgcagtacctctaagagtctgcaagaagcatcatgttactggacttggggtatcctctaaagcagatacagcttaggtcaccacacccaagttatttcaaatatccagaaagccttcccaagaagaatggctacaaataagcccagacagtgaagattacaacaaatacctaatcctccaattcctagacactgaagaacatctattagcatcaacaccatccagaaaaacatgacctcaccagatgaactaaataagtcaccagggaccaatcttggagaaacagagggatgtgacctttcaggcagagaaaaatagctgtgttgaggaaactcaaagaaattcaagataacacaaagatggaattcagaatgctttcaagtgtatttaacaaagaaattgaaataattaaaaagaaagacagttaaacttctccactgacatttttccagattcagggtctataagccacttctttcaattcttgtctgaagcagaaagtcgatttaaggatattagcaaataaaaatatagtgaggccaacaatcttaagaatgcttctcaaaaaatggtgaaaaatttttcttcaaatagtgaacaaaaaataaaagcctttctatttgtgcagctgcttcaataaaactgcaacttctccgtcaattaaaacttttaatccagacaatagagagaagtccatcttttgatctcattcttctgctagctgtgattccatttctttgtttcctcttgggtgttattaataaaatgtcaaaaaaacaacagatgttggcatggatgcagagaaaagggaatgcttgtacactgttcatgggaaggtagattggttctacctctacgaaaatcagtatgtagatatctcaagggattaaacatagagctccccttcgacccaacaatcctgctactgggtacctacccaaaggaaaagaaacacctgcactcctatgtttatttttatttactttttttttttgagatggagttttgctcttgtcacccaggctggagtgcaatggcacgatctcggctcattgcaacctctgcctcccaggttcaagcgattctcctgcctcagcctcccgagtagagtagctaggattaccggtgcatgccaccacatccagctaatttttctatttttagtagagacagtatttcaccttgttggcccaactggtctcaaactcttgacctcagatgatccacctgtctcagcctcccaaagtactaggattacaggcatgagccacagcgcccggcctgcactcctatgtttattccagcactatccacaatagaaagttcatggaaccaatctaagtgtacattaacagttgattggataaagaaaatatgctacatatggccaggcacagtggctcacacctataatctcaggactttgggaggatcacgagccgggcagataacttgaggtcaggagttcgagaccagcttggccaacatggtgaaacctcgactctacaaaaaatacaaaaattagccgggtgtggtggcacgcacctgtaatcccagcttctcgggaggctgaggcaggagaaccacttgaacccaaaaggcagaggttgcagtgagccgagatcatgccactgtactccagcctgggcaacagggtgaaaaaaaaagaaaagaaaagaaaagaaaatatgctacatacacactgtggaatactatgtagccataaaaagaataaaatcatatcctttacagcaatgtggatgaagctgaaggctattatcctaagataacaaactcagaagcaaaaaaatcaaattctgcatgttctcacttaaaatgagaggtaaacgatggatacatatggacataaaaaatggaaataataaacactggagactccaaaaaagggcagagagaggagggagtgaggattgaaagattacctattgaacacagtgttcagtttttgagtgacaggtacactagaagcccaatccctaccattgtgcaatacccccatgtaacaaacatgcacaggtacccccaaatctaaagtttttgaaaaaaagaatcttgagcatctttgtaaaggatttaaaggataaaataaagaacagccacgcaagttttcttataatagatgaaaaaattatattgattacttaatatgaaaaataaactgcatagtcttactttcttcaatttcttcactcatttgtccttaaactgagtctgaagtggccttctatccttccacctcatagaaatgattctgttaaagtcattaatggcctgcatattgctaaacataatggtcagttatcaggtctcttcttacttaacctgccagttgattatttcttcctgcttgataaactttcttcacttagccaccaggacactgaactctcttagtttcttctcatctcgctgtttgctccatctcaatgtcctttactgcttcctccttttctcttgacttctttatcttgggttgacccaatgccgtttcccttctctttttcagctgtacttactctttggtgatctcagcctctcacgttttaaatgttatctatctgttacaagctccaaatttatatccccaatccagacttctgtaccaaactctaaactcatgtattcaactccctgcacttggacatacaacaggcatctcaaactcaagatttccaaagctgagctcctgatattcttcccccttaaacatgctccatccacagctttgccaatcttaatttatgacttcctcacccgcccagtgtcttgggccaaaatcccggtagtcattcctgattcttctctttttatcacatctcacatctaattcaccaggaaatacagtttgcttttcctgtaaaacatataaatattctgaccaattctaccagctctacttccacaaatctgatctgagttaccattgtcactggaggattactgtcatagccttacaaatactctttcttctgtccatgcctatccgtagtccattctgtacacagcagcaaggcggatccttttaaaatataagcatgatcatatctgtcctctgtccatgcctcccatctttcacttacagccaaattccttaataatggtccataagtttctctgtgatctatttttccatattctcttcaatttcatctcctacctctttccccctctactccagacacagtggcctccttgttgctccttaaaacttctattgacacttcctcataatggtccttgtcagtagctaatatctctgtctggaacctttttctccaaggttcactgactgtttccctgagtcatttgataaagttcaaggcaaatcctacatctccctctgagtgaggaggtcacccgggcacaaatcattgaacacatgtaacagtgaaacagcaaaggaactaccaaaacaaactccacttttgtttaagaggcatttacccattcctgcatgtaagttaagataattttaaagcactgagataaaacacaaaagcaaccatgtagttttttaagtaaactgtacaattaaaggggagatatggaaacaactaactatgttttcctgaagatttatagaagcattgtgacttgaccaaggacaaagaagttcccaatcttctcagagcctcactggtacccagatgtctgcagacttcagtcacctcttgatcccaacccctgagcatagtttcctcatatcgccctcccataagaaccctccagccagcctaagaaacttgagatggtctttgcaaccctagcctgccacctccttgggttgctgcttcccgataaacctgcttctcctcacaccaactctcgtctcttgactttggcttttgagtggcgagcagctgaacctagatttggttacacacatactggcctatagtgcaaaagagaatatgtatatgtttgtcaatgagaatggctggatttgcctaattctctgtttttttgtatttttatttaagtttggaattagttgtatataaaatgtgtgtctgtgcccctgagtgtgtgtgtctggattcagattaatatctccttgtcaggggcatgcctgcgtctcttagctgcaagaggaaaccatgctctgtgtcctgattctacctgggcatcaatgtaggaaacaaagtcttggctttcacctactgatgcatccatctctcccacatctcaacccctgctgactgtctgtttccctgattgtgggtcatatgatgaagatcatgataaatctcatgtccccctctaatggagtagactgcagtttgtgtgtaatggagggtgatgggaaaaggggaagtattagcatgccttgggacccacaatagagacaactcagacttctccagtcaccaaaatgagcagaggtggctgatgtaagagcctgagatacactccaggcaggatttcctttccacatgtgtgtgcctgtgtgtgttggggtgggggcaaactaataaaggtaagtagatgtttgagacagagagagcaagaaggactgtgtttgctctcaggaggttacatttcctatagtaatggctttatggagaaagtcgttttcctgtctctgcagaaggagtccagaattccaggtggatttctgtgaatatcccaaggaaggcgccaccatgacattccacttcccagtgtactcgagcaatgtggtagtgatgaacagcatccagaaagggttatggaatgagaaaaacatgtttctctggctcctttgtgacagggaagtcttttgagctgtgagttttggtgctggacaatcagtaccaggtatgtgggccctaaggggtgaggggcatggacctcagtggctggggtggggctgctgtggaggaactgagtccaaatctgatctggtctcagtagaaaaattggattccatatcctaccatgccctttgctgcacacaagccccagccacaaaagctgacctctggttctggtgctctccttgtcttctccataaaacatgctcattcttgcagatggagctgaaacatcaaaactctgaaccttattggtcactgtctctttctcattgagaaaacacagatcacagacacattccccactgcagtccttcatccctgagggcggaggacatgtctcctgtgcatggcagcagtcttgaccctgaggaaaatattgaagacaactttttaagcactgcagtgtgtgctgtgcaagtacagattcagaggtgaatccaacacatctcctgccctcaaggacagtcaggaatgttgagggaaaattacaggcttgctgtcatcagggtagaccagggatgagaagctctggaagcaaagaagtgggacaatggaggatgatttactgcagccaaggcttggccatgtttcctggagaaggagatatttgagctgttttgttttgagggagaatagaaatttttacaggcaatgagaggaaaggcatttgaggaaagggaaggtggaggtctgaatgttctgagctcacaaacagtacatctctttccccaggtgtttgtgaatgggaagtccacctatatgtttgcccactccctttcaccacagtctgtgaaaatggtgcaggtgaagggagatactttcctgacttcagtggatatattgtaaggggcagagaatcttgcaataaaaatatccacctcattacactcttttataatgtgcatgatcacagcatctcccagaaggtgccagagtgtctcccaatccccacacttaagctaatgatagtaaaatcttcctagtattagccaggacttggctctcgctaataggaaagatcccaagggaagatttggcacatgtggaaattcatcctgggtagggtgtacagagtgtggcttgggaaaggtgcaggtggttaaaatgtcaatggttgcccctgaaatagagacagagccaaagcatctcatgatattatgcagaagatggaagggtgttgggctatggaaggaagaaatatggctttgggcgtgtgactctcttttgagttgtttgttcattcaacacatagttattgaccccttactgtcatatacctctatgtatgccagacattcccatatcactggtgtaaggagctgagaggaccaggaaatgatcctattggcaaaaggaactcgatactgatgagttagggatgaagttgttcttagaggggctccttaactcaggagttaagtgtcagttggtcaggcagatgtaccttgaaccctgatgcatggctttctggaggtctatctcccctccctccactcaggaccactcagggtgcacccaaaagctttcaggggtcacaaagtgtgatccaggagactgggctcagacctttccagacctctctagcctgaggtcctctggagacatacagaaaagccaaaacctgtagacctaattatcctccaagtttctgtggtccctgagtttccacaaactcccagacacttcatgtaaaaagaatggttgcttttgtcatctttaggccctcagagtgttcttccatgattttcctcggaaagttttgttcatgttttttttgtgtttttggttgttgtttgtttgttttgtgttttagagacaagctctttctctgtcacccaggctggcttgcagcagtgtgatcacagctcactgaagcctcgaaccccagggctaaagtgatcctcctgcctcaaccttcttaatagctggtactacaggcacatgtcaccatgcccagctaattttttttatctttgtagagacagtctttctatgttgcccaggctggaatgcactggcaggatcatacctcactgcagactcaaccttctggactcaagcaatccacctacctcagcccttgaaagtgctggtattacaggagtgagccactacgtctggctccccaagaagttttgatattgcttacgtgtctatctattaccacaataataaccatgaaaagatgctgaatcaaaacaaacaaaaatagttcaggttctggagcaagcctggttcaaacctctgctgtcttaattcttagctctgtgaccttgtgcaagtttcttaaactctctatacctcagtttccttttttgaaaaatgaggatagttgtatctatctcatatagttgttgtgagcatcaggtgaatcgatactttttttaaaagatgctgaatcaccagggaaatgcaaatcaaaaccacagtgggatattacctcacatctgttagcatggctattttcgaaagaacaaaagataacaagtgtgggcaatgatgtgaagaaattggaggccttgtgcactgtgggtaggaatgcaaaatggtgcagccactatagaaaacagtatggaacttctgcaaagaattacaaatataactaccatatgacccaggaatcccactcctgggaatatagcaaagaagttgaaatcgggatttcaaaaagatattagcatcccattgttcattgcagcactattcacaatggccaagatatggaaacaacctaaatgactatagacagatgattcaataaaaaaaatgtggtgtatacacacaatggaaaattattcagcctttagaaagaaggatatcctgcaatatgcaaccacatggatgaaccttaaagacattatgctaagcagataagccagccacagaaggacaaatactgcaggattccatttatatgaggtgattgaaatagtcaaaattagagaagcagagagtaaaatcgtggttactgggggtcgggaggaggggtaaatgggatattgctaaccagcggacataaagtttcacttacacaagatgaataagttctagaaattgtctgtacaacactgtgccaatagttaacaacactgtactgcaaacataaaaaatgtgttaagagggtagatgtcatgtcaagcatttttaccacagtaaagtaaaattttgttaaagaatacatgtaaattagtacaaacactatggagaacagtttggtgattcctcaaaaaactaaaaatggaaatccagcaatctcactgctgggtatatatccaaaagaaaggaaatcagtatgttgaagagatatctgcacccccatgtctactgcagcactgttcacatcagccaagatttggaagcaacctcagtgtccagcaacagatgaatagataaagaaaatgtggtgcttatacacaagggagtattattcagccataaaaaagaatgcgatcctgcaatttgtaacaacataaatggaagtgaagttcattacgctaagtgaaataagccaggcaccgaaagacaaccatcacatgttgtcacttgtttgtggatctaaaaatcaaaaacaattgaactcatgaaaatggtgagtacaaggacggtctccagaggctgggaaggatagtagagggctggggatgagagatgcagatggttaatgggtacaaaaaatagttagcatgaatgaataatgcctagtatttgataacacaaccaggtggctatagtcaataactgtacatttaaaaataactaaaagaggccgggcatggtggctcacatctgtaatcccagcactttggaaggccaaggtgggtggatcacttgaggccaggagttcaagactaacctggccagcatggtgaaaccccgtatctaccaaaaaatacaaaaatttcactgggcgtggtggcgcatgtctgtagtcccagctactcagaaaggttgaggcacaagaatcccttgaacctgggaggcagaggttgcagtgagctgagcttgtgccactgcactccagcctgggcaacagagcaagactctgtcaaaaaaaaaaaaaaaaaaaaaaaccctaaactaaaagagtataattggattgttcataacagaaagcataaatgtttgaggggatgtaaaccccaatttctatgatgtgattattatgcattgcatgcctggatcaaaatatctcatgaaccccataaatatatacacctacaatgttcccatataaataaaattaaaaattaaaaacaatacaaaaaaggcatgtgctattctattggtcctggcatactggctttgatagacacatccatcttttctcactggtagtgtcaatcacctacttttatgaaccattcttaaatcaatttgagacagcatcccacattaaattgtacatccaaggagtcaataccagtttcaaaggagatagaaatagaccagatttttcttttttctttttttattttatttatttatttatttatttatttatttatttatttatttattttgagatggcgtctcattctgttgccaagactggagtatagtggcacaatcttggctcactgcaacctctgcctctcaggttcaagtgattctcctgcctcagcctcctgagtatctgggactacaatcatgtgccaccacacctgactaatttttgtatttttaatagagataagttttcaccgtgttggtcgaactggtcttgaactcctgacctcaagtgatccacctgcctcagcctcccgaaatgctgggaatacaggcttgagccaccacgcccagccaatagaccagatttttgaaacatttacatgttaaaaaaagagagagagaaagggagagagcaggatttatatttattcaatgtgagggagagtatgtcaaagattactcccgttcaggaacagctaagtggagagggtttccatattggtacagggaaaaatggaggagaacctgatttgcattaatagtgacaggtgtccagaagaaatgtgagtagtgatgttaaggcagaaattacatgttaatatgtctggagctccagtagaaaaggttgaggtctatggtagagataaacttggcatattcagcacatatcttaaacacgtgcagacttgatatggcctaaaggaaactaacacagatgtggaaacatggggaacccaagactaagcccttcaaaagtctgatccttaagaattgaatagaagaagcatgagaaggctctaggaatgagaaattccatcccccaccccctcccccaccacaacatcaaataacaaccatacttggaacccgcagaatcagtgttgggactcacagcagacagcagcatgacaaggatgcaatgatatttgcagcagggaacatctgggaatacagaaagggccttgcaaaagcagaacccaaaaaatatatacccttagaaggtaaaaaacccaccctcgaggcaactgttaagattgagacaaagaaatgggatggcacagaattgctgagcaccagcagaaaagaggagaaagagcaatatcttttaaattaaacatcagtgtagcaactgaaaaaagaactcttcctcaagataatttattttcatctgatagaaaattgtcataggctgggcatggtggctcacgcttgtcatcccagcactttgggaggccgaggcactcccaaagtggtgggatgagaggcgtgagccaatgggcccagcctattagcatgttttgaaagtatacaatgttatgttactgatgataagtctgtgtcccttcccaatgaggcagttatataggacacaacctaccactacacatacagcctcaaagcactggcccaggctctgcctcaccttacagctgacccatgagggttcatctgacaacttcaggctccagaggcgttgaagaacaacaaattgttgattgtctacacacagagattgttgacggctgttgtgataactcagttcttgtcttcttagtttaaaagaatttaaacaagatgcagaaaaaaaggaatgcttttatgctgttggtgggaatgtaaattagttcaaccattgtggaagacagtgtggcgattcctcaaagatttagaaccagaaatatcattcgacccagcaataccattgctgggtatatacccaaaagaacataaattattcttattataaagatacatgcacacgaatgttcactgcagcactattcacaatagcaaagacatggaatcaacccaaatgcctatcaatgatagactggataaagaaaatgtggtacatatacaccatagaatactatgccaccgtaaaaaggaacgcgatcatgtcctttgcagggacatgcatggaggtagaagccgttatcctcagcaaactaatgcaggaacagaaaacaccgcatgttctcagttataagtgggaggtaaatgatgagaacacacggacacaggggagggaacagcacacactggaacctgtcaggggggcaggggaagggagagcatcaggaagaatagctaatgaatgctgggcttaatacttaggcaatgggattatccctgcagcaaaccaccacggcacacatttacctatgcaacaaacctgcacttcctgcacatgcaccccggaacttaaaataaaagttgatttaagaaaaaagaatttaaacaagagacacacagcaaaagagatgcagcatagagtaatctattgcaaaagaatactttgaaggttaagtgcagaatagacagtacaccctaagagagagaggtcagagtagtttgctcatgagaatgagacagtgttgcgttttgctggagaaacctcatttctgggaaacttacatgattattcataaggaggtgggaaaaggtgttactaataagcatgttctgggtggtcttctgggtgcacacgcacagtagctgtacatgcctgttcatacatcatgtgtctcattagcatcttaaatctccacccagagatgtgttttttactattataatgagcaacagatctgcttgaggacaggtaaaattaaaatgcacattctttctagaaacgaaatcctctactgaagggagctttgcttgaatgagctctattacaatgtgaatgctgaggcttactgtgttgattgtatggccaccaaggttgctgcatcccaaaaacatggtctcttccttgactacctgtcttgcctcaagattatcacatggatttcctcaagcaaatagcatttatgggactaggatgtggacatcagaagacatccaggaagcacttggaaaaagttttctccttgtttctacagacacgccgattgtgctagatgccttggggtcaataaagacccatgtatctcttggtcatctgagcagagttaaattaggaattcaggactggcttttcaggtaaaagaagtgggcactgacagcttggctggatttcccaggtccccatttaattattgtaataaaagctcaggctcattcactccctcatttaatgtctcagctcataagatgaatatctaaggtatggcaacggtctgcaataaacagaatgcttgtgtcccctcatatttatattgaaatcgtaacccccccggcaatgtcacggcataaagaggtagggtcttagggtggtgattaactcgtgagggtggggcccttatgaatgggattagtgcccttctaaaaagtaccccaaggagctctctcgccctctctctaccatgtgaggatacaacaaggaatcagcagcgtgcaacctggaggaggcctttcagcagaacccagccatgctggcacccagatctcagacctccagcctccagaactgtgagaaataaatttctgttgtttataagacactgagtctgtggtatgatgttgtaacaacctgaattgacaaagacatagtctaagtaagaaataattataagacaactttatgccttggagaggcatcactggacagacagtctgtcttattaagtataggacacagtttcttttccaaggctggaaatggatggagcctgaagatgtctctgatgcatcctctcccaccgctagagggcagcatcctaaggatccgtttccgaagcgctggaattgcgtttttagaggtcacagaccctttggtaaacaaataaatgctatggacgcctaatttttagagtatgttctcatgtttacaggttcttctatattcagaattttaaaatatcattctcaccaagaatcggaacttactgaaaaagaagggagtgaaagaatttctgagttcgtgggaaacctggccatgcactgcagtgtaatgaaaactgggactccagggggcaaatgagggtaaatgctgttcctaaagcggggatcagttaaaaaaggtcaatcactaccttaggtgattggtgaaaggttggtgagtttagcccatgagataatatatgtgcttctcttttggggtcccagcctcccaaagtgctgggattacaggcatgaaccaccgcgcccagtctcttatggattttttttaaatcaagaattctctggaaagaacattttcctttccggaaggggccacgtatacgctatcttgagaagaaggcaggttatatttgagaagaatcaaaatttaatgtcagatgcagcaatgaggtttcatgtttagcaaatctgagtctgattgttgaactattacatggacaacataatgtcacagtgggaatctagtgaaaattggcccaatatgtcttgagaagccactaggggaagccaaacactacgtaaccaaaaaaatcaaattggggttaggaaaacagaattagctaccagggaaaataatgtcccaagtgttctcaccttcttcttcttaaattgaagtttaaagcattttgcggctcaacccctaaccgcaaaagaaaagcacacatattatcccatgggctaaactcaccaaccttccacctaaggtagtgattgtcgtcttttaattactccctgcttcaggagcagcgcttaccctcatttgccccctggagtcctagttttcattccactgcactacatggccagacttcccactggctcagaaattctttcactctcttctttttcagtaagttccaattcctggtgagaatgatattttaaaattctgaatatagaagaacccgtaaacatgagaaaatgccctaaaaattaggagtccagagcatttatttgtttaccaaaagggtctgtgacctttaaaaactcaatttcagccctttggaaacggattcccaggatgctgccctctagcggtgggagaggatgcatcagcgatattttttttttttttttttttttttttttttttgagacggagtctcgctctgtcgcccaggctggagtgcagtggcgggatctcggctcactgcaagctccgcctcccgggttcacgccattctcctgcctcagcctcccaagtagctgggactacaggcgcccgccactacgcccggctaattttttgtatttttagtagagacggggtttcaccgttttagccaggatggtctcgatctcctgacctcgtgatccgcccgcctcggcctcccaaagtgctgggattacaggcggcatcagcgatattttgaccagcctggtcaacagggcgaaaccttttctctaccaaaaatgcaaaaattagctgagtgtgttggtgtgcacctgtaatctcagctattcaggaggctgaggtaggagaatcgcttgaacctagaggcggaaatttgcggtgagcggcgatcacgccactctgcactccagcctgcacgacagagtgagtgagactccccttaaaaaaaaaaagatgtggaatgcatgtttacaacagcacaatttgaaattgcaaagatacggaaccaacctatgcatctattgaccaacgggtgaataaagataatgtggtatatatgcaccatcgaatactacgcagccataaaaagcaatgaaatcatgttttttgcagcaacttggatagagctggaggccattattctaagtgaagtaactcaggaacggaaaaccaaatattgcatgttctcgcttataagtaggagctaagctatgggtacacaaaagcatacatagtgatataatggactttggggtctcgggggtggggaagttgggagaggggtgagggatgaaagaccacgtattgggctgggggtagtggctcatgcctgcaatcccagcactgggaggccgaggcaggcaggtcacctgaggtcagcagttcaaggccagcctggctaacatggtgaaaccccatctctacttaaaaaaaaattacaaaaattagctgggcatggtggtgggtgcctgtagtcccagctactcgggagactgaagtgggagaatcacttgaacccaggaggcagaggttgcagtaaactgagatcacagtaagctgagtgcagtggtgcactccagcctgggcaacagagcgaaactccgtcaaaaaaaaaaaaatgactacaaagactacatactgggtacagtgtacactgcttgggtgatgggagcaccaaaaatctcagaattcaccactaaagaactcatctatgtaaccaaaaaccacgtgtacccccaaaactattgaaatttagaaaacattctaaaaatgaataaaataaaataccagtaagacatgtgatgtatgtactcatatgtagagcaatagcacatgcgcatccaggagaccacccacaacatgcttaaaaacaatacccctttccatgccctcatgaataatcgtggaagacttccataaagggagtttcccagtgccagtctgggctgtctcattctcaagctgccgcctctgacctagctttcagagtgcactttcgctctgcaataaactcctttgccgacttttactctgcacttgactctgaaattcttttgtgcggtgaagtcaagaacctgaactggccagccaacaacaatagcagcgtcaggctccgcaagttaaagggctcagacccacctaattgctgccacttcaggtggcagtcgcaaggtctcaactgccacctgcacttctgaccaactggctataaattggggagttcccatgaccctctccaaaggttgaataatttgctaaaatggttgcagaactcagaaaacactttacttagattgttggtttattataaaggatacgacttaggacagccaaatgaaagagatgtatagagcaagaaatggggggctgggtggatggtgcagaactctcaggccctgagtgtgccatgctcccagtactttaaagtgttagcccacccggaagctcactgacaggttttattccttaggcataattgattaaatcattggtcatgggtgattaactcaatctacagtccctcttgcctccctggaggtcggggtggagctaaaaattccaaccctctaatcacgtcttggtctttccagtgagcagccctcatcctgaagctacctaggggcccccagccaccagtcatctcattcacatgtaaaagacactccttactccagagaatccaaggattttggagctgtgtgccaggaacctggacaaagaccaagtctttattttttgttttgtcacaacaggcaatatagtcttctggttaacagcccaggctctggagacacactgcctgggtacagttccatgtcatcttctaaaatgtgcccttagcaagttatttcttaacatatccatgctaattcctcatctgtaaaatggggataataccaactacctcttagttatgttatgaaattacatacattgattttttattgttcaaaaaagaccatgtacatgtcttttgttaataaaataaattgaatgtcattaattgttttcttgtccagattagaatttcatatctgagctttatccaccctcttctctccgtaatgctgaattttacaacctatacaaccgacataactacagctccaggaaatccagaaaaagggtgggactgctctaacctcagctgctgatggcctctttgtagattgtcttagctgatgcctttactctggaagatggcacagtttctcattcctttcccaggaaaggaagatccaatagaaatttacccatcctctcgcccttgatggctacaacctgaaaatgtcttcaatgcatatgacctcactcctagagggtcgcgttttgagaatgcataaaagctcactttgggacgccaaggcgggcggatcacgaggtcaggagatcgagaccatcctggctaacatggtgaaaccccatctctactaaaaatacaaaaaattagctgggcacctgtagtcccagctactcaggaggccgaggcaggagaacggcgtgaaccctggaggcggagcttacagtgagccgagattgggccatggtactccagcttgggtgacagagcaagactacatctcaaaaaaaaaaaaaaaaaaaaagctcaaagctattctttgtgggccgatgatggatataataaacccctcaaacttattctcagatccacaggaaacttgagcgactccctatgttctgatattttctaaatacaatgtactgcattccttttgacttccccaagcccaaacattccagagaattttacagaaattctatttttgatctgaatttgggggcctgcacatgagactttctctcaaattaccctctattttgtccagaaatcccttatagttcatgtccttgggactctgttgaaggggagaaggaggaaagtcctccctactgtttctcatgccttcttgagctctgtgtcctgcatctgtagtgcatgctattaactttgctcccagatcttcttacccatcagggcactcatccctcagatgctgtcacgagaagctggctccccccgctctggagaattgtccttggtcaaacagaagtcacttcacttcggaggtgaaggtccccctcacttcctccaacttgttgtagaaccccaaaatttaggttcacattcccaacgtgcagtcagccaaacattgacacttcagtgcttaggagtagagaggattatcccatttggccaaagtgagagggtaggagagaaagtctctcagatctaacctgcctgtgaacataatagggcttttatgaggaaggtaggtgtgtgggaggtgagatgccctaataatcaaaactgattgcattcttgggcctgatcaaacttctggatgccgtgaaggaggtctgtgtgacctaagaatcagtttcttttttgtttgttggtttttgagacaggatcttgttctgttgtccaggctggagtgcagtgaggggcatgatcatagctcactgtattctcgaactcttgggttcaagtgatcatctcgcctctgcctcccaaatagctgggactacaggcgtgcaccaccatgcccagcaactttttttttttttttttttttttttgagacagagtcttactctgtagcccaggctggagtgcagtagcataatctcgggtcactgcaaactctgtcttccgtgtcccagttcaagcaattctcctgcctcagtctcccaagtagctgggattacaggcacgtgccaccatgcccagctaattttttgtatttttagtagagacagggtttcaccatgttggccaggctggtctcgagctcctgtccttgtgatctgtccacctcggcatccaaagtgctgggattacagacgtgagccactgcgcccagcacccagctaatttttaaaacattttgtagagacaggatctcaccatgttgcccaggctggtctcaagctcctgggctcaagtgatcctcctgctttggccttccaaaatgctgggattacaggcatgaaccaccatacccagccccatggaccactgttctttagaaaaacaagttcattaaccctgcaagtagccccaggagttaggatatgaagttagccaattactcgtgactccctctaccaaaatggctatgtgaaagccagcatgcatggaggaagacgggaaaataaggaaaacaaatctctcacgattttcataatgcaggctcggttacaaacccagaaggcagaatgcagtcaatgacttggtgatatgggggtacagaagaccactcccatacctcaaagagccactgtgaggtgcagttcaacctccagtgcttctccctggaattagactaagctacatccagctgagaccacattccagctcagctccctttgctgtatttcagttttctcacatctctatttctggaagctctgtttcaataaatcacttgaacaagaatccctgtctgaggctgtgcttcaggaatctaatctgtaacaccatctctccaagggagaacatttaccttgttagtctcagtccagaaggaaaccttgttatttcaggccacctgtgttgcaaatcccttcagtctctcacccagggcattgcatttgaatttcaatgctaaatcagatgtatctttcttcaatattctgtatatgaaggttcacagggaagaaactcatacagatcatttgataatactgtcaagcaaaagttgtagaaggccattgttttggactgagctcctatactaggcccaacggaccagaccaaaccaaaataaagtcactcatgctaaatgccacattatccaactgaaactttaagatggcagaaaaatccccaaacagatcagtttttcctgacaataggagatcccactttacctcagtcagtgtaagaaggaagtcccctctgctttaacccttatttaaaaagtaaccggaagtaatttgacatgaaccaatcagctttttttcctatttttctgtttcctttttcccaccttacaaaattcactgttctgccactggccagtgggagctctcattctatttcatagaatgaaggatgaataaaaggattcatgaattacgaataaaagccaataagatctttatctaaatgtgctgtaattttgtctttcaacatgatttgccttaaactgatattcctcacacttattttcatccacatacaacttcttatcatatcttatcctaaagtatcttatcctaaagtataatgaataccacagactggacaatttttaatgaaaagaaacttactgcttacagttatggaggctgggaagtacaaggtcaaggggctcacatatggggagggtcttcttgtttcatcagcccacggtagaaggcagaagaaagggaaggaaagagagagagaaagagagagagagagagacactcgatgttataacaaactcactcccgagatactgagataatgacattaatccattaatccagtcaggcaagccgagctctcctaacctaatcacctttgattaggccccatctcccaacactgttgcattagggattaacttttcaacccatgaactttggagaacatattcaaagcataacaagaagggaaaactagtttgctttttaaatacatgttgatgcacgtagcacacatctggacaccaggcaacatttttctaaggagcctcctactcatcaattcttctctaccccacccatgacaaacatattgccactttctataagtggcattaataggaatgtgaattatgagtgcagaggtacccagcaattctaaatggaaggaccatgacacacatcaataagaacaagatagaatgacaacctggcttaacaagatgccgtgactttataaacctatagtaatttaaggcatatgagatatacaagtcttaagctcagaggagaggctgatgacaattacaccactacagttaaagactgcaaactttagccgggcgcggtggctcatgcctgtaatcccagcactttgggaggccgaggcgggcagatcatgaggtcaggagttcgagaccatcctggccaatatggtgaaaccctgtctctactgaaaatacagaaattagccgggcgttgtggggggcgcctgtagtcccagctactcgttagattcagacagaagaatcgcttgaacccgggaggcggaggttgcagtgagttgagatcatgccactgcactccggcctgggcaacagacagagactccatctcaaaaaaaaaaaaaaaaaaaagactgcaaactttggcatcaggctggctggattcaaagcctgattttgccacttgttagcccatgaatagtaacaagatgcttaaattctctgtgcttgaaagttttcatctgtaaactagagataatattaggacttgcatcacagggtttctgtgaagatcaaaagaaatatgtgaaaatcaccttagcgttagaactgtgccttgcacaaagtaaacactcagtaaatattaactcttattatagaagagtgtgtgttatctcctcaactagataaaataatcatagaatgatggtttcagagttgtgaggccatttaatgcaattagattttataaatctaatctgtacaagtagacttgtgaaataaatctggaatgcctgctaaattttattgaaagcaatcgcgtgtttaatggtgcataatatatcaaagtacatgcatatttaatgctcaaaagacattatctgcttctagagtggattaacatttcaggcagtgagaatgggggtttattactttaatctaaatagggattaagttgattagattcagagtttggttgatttaagtactgattggtacacctgttcgtgtagggcacagtcctttcatcgctcccactaaaagtttaacacgggaactaagctatgaggatgcaaaaggataaggatgatacaatggactttggggaattgggggaaaaggcaggaggatgagggataaaagaccacacattgggtacagtggacactgctgcagtgatgggtgcaccaaaatctcagaaatcaccaccaaagaatgtattcttgtaacgaaaaaccacctgctccccaaaaacctattgaaacaaatatttaaacataaataaataggccgggcacagtggctcacacctgtaatcacagcactttgggaggctgaggtgggtggatcacctgaggtcaggagtttgctaccagcctggccaacatggcgaaacccagtctctactaaaaacacaaaaaactagctgggcgtcttggcagacacctgtagtcccagctacctggggggctaaggcaggaaaatctcttgaacccaggaggtggaggttgcagtgagccaagatcacgccactgcactccagcctgggtgaaagggtgaaactccacctcaaaaaaacaaatttaattaattgaataaataaatacatagactttgaataatcatcatccaaaaagaaaattaaattaaaaggatttccctttgagggagctatctgtgaaaggaaattgcttaatacaggtgagcacaaaaagagaaagcaccctcttatttcatattttatttttcaacttgttaaagattatattttcgagctactctcctaaactagaaacccaccagctctaacttagtattcttctccaggacaaagggtgtcatttgtaaggaatgacaagatctacagggaatgctaaaatgataaatttaatacatcagtgtgacttagttaaagcaaaatcttccagagtctcaaactttgcgtgttattttctggtagctcctgaaagcagtctgagaagaatacaacagaaaagatgaagaattgttttaaaacaaaaattcaaagtaataataataaataaaagcctaatattccctctcgcacttggcaggcaccaacctaccatttttgtacattcagctccacaagactgttaggttctactctgccatctcttaaaagttagcatctaattcacagtactatttaaatttccccagttgtccaaaagcatgtcctttatagctgttttaaaatccatcatccaatcagatttcatgcctttcattgttatgcttctttagtctcctttgtcaccatgcctatagactcaggggctgaggcgggaggcttgcttgagcccaggaggtcaaagctgcagtgagctgagatggtgccactgcactccagcatgggtgacagagtgagaccctgtctcaaaaaaaaaaaaaaaaacctctgtattctataaatataatatgtacaattattccatgtcaattaaaaataaaagagaaaaaagtctttataatccatgtatatgaagttcaaaagctggcattactgatctgcgatgacatagtcaggcaagttggtaccattgcataggcagagatggaaagaagcttgtgggatgctggaaatattctgtttctggatctgggtgctggctacatgggggcttaaaatcgctggtgttacactaatcactcatgaacttttctgcatgtatgtgcaacttagaataagaaaatggaattacggttcacatgctaggcatgcctggatcaggctagtggacagcatcctgtaccaccgtgtcccatcctaagtgctgtagaaacatgttcctaatacttcagtgcatgccaaaataggcaaatattttatttacatttgaaatctcacagtagcaaggtcaactacagccactttcccccagggagagtccaatattttattcatgtctcctaaactcttataatgagcaactaccatgggccaggtcctgtgcagggctctgaggatcacagggaaagacccacaacctccctcatggagaccaacattcccagaaaacccacgcaaataaacatagcgaggtatggtgaagctccgggagtgctgccgcaccacacagaagttctgacctggcctggggcgtatgagagaagcctttgatgagaaagtagggaatgaggcctctgaaagtaaggggagggtgtgctccaaacaaatgcaacaaaaagagaaactgtaactgcacacggttttcagcctcatgcctccgtggaacctgcctgtcaggcgggcacctggaatctcaagcaactttctcaaggtgaggcgatttttttctttcatttctcaagtagcttgtggtaagaaaagtgagctgagactgggtgcagttgctcattcctgtagtcccagctgcttgggaggctgaggcgggaggatcccttgagcctgggaggcggaggttgcactgagccgagatcacaccactgcctgggtgatagagcgagaccccatctcaaaaaaagaaagaaaaaagggaaagaaagtgaactgagtgttctgtgtctcccaaggccccttgaatggctttgtccttcacttggaataaaattcaaacttcttcaccttgccccgaccttggttggcctttccagtttgagcttttcccgatattcctctcccacaacacacctcaactacagtggcctcttatctgcacctcagacatgaaaaggtttttcatgtctctgggcctttgcacttgatgttccctttgcttagaacactcttccctctccttcagtgaaaatgatacttcctcagagacatcttaccttaccttaaaactactgcacatcctctgaatcagtgctgttggtggcattcataacaccagtagtatcataatcagaactgcgtattgtcttgtttccttttttatttcctgcttccctccctagaatgccagcacttgggaaggcggcagtgagttctatttttgtaaatcccaatttcctagtcactggaacaaatcttagcagagcaggcattcaaataattaagcaaacaaatgaagaagtgtcaggggtgttttaacgttaagttctgcaaaattccctgctattggggaggtcataccctttgaatatatcactctctttccatcctcattagtgtcatagggcaactccagggactgattctaacatttaaacggaaaatttgaggcccactttatcctttccgataggatttgggagtttctacccttgactgtgttagaagtgttcctgaattttattcctgtaaaagacatagatggggccaggtgcaatggctcactagcactttggcaggccaaggctggacgatctcttgagcccaggagttgaaggctgcagtgagctatgatggcaccactgcactctagtctgggcaacagagtgagaccctaaaacaaaacgtaaaaagatacagatgggtccttcaatcatttggccttcaggctacctgcaatgttcccagagacagagttctttcgctagtccaagacttttccaaaccaacctggtgggggtgtggaggttgcgggagaggacagagttgaggggtagtataagatgggccaagaccagagtcccatctctgcttcagaaagcttgggtccacattgagtgtggggaggccatatctcatggatagagactagatctgtctagtgaattacactcaccccacaaataagacccatcatggagaagaacgttagggggaggaataaataaatgagttaataaggtgcctgaaaggtggagtaaatgagtaacagagggacagagagagggatgctcagaggaaagaaagaagcatgattcttttaatgcaatttatattttaagtttccttgctgaaaactcgttatgggctccccagctgcccccaaatccatactcaagagaagatacaagatcccctatggtttaggctctgccaagttcttcactgtcatccattgctgtctcaactggaagaggttgaaccgagatgggcgggtgaagggcttaactcccatcatcccaaactcctagcaggatgcctcctgctgcactccgggtctcactggaagccgtccacgcacagggcacctccttcaccttccagtttgaatcatcttaccaacttatttttctctcagcgccttgtttatttactcattgatcccaagtgacatttttgaacattttatccattttcagttcgctccactttcttttgttttcttccactctctggagtcaaggatcagtctttttttttttttttttttttaaacatagttttattcccagtgccctacacagcatcaggcatataataggttctaaataaacagatattgaatggattattggagggcgtggtattagggtaggacagggtggggacatgattacattaaaattctgcttaaataagcgggtcttttagcccagcagtcacatagactcagctcaggagctctgcagcacacagctgatcgaacccactcatttctagaggacaccatgtttggtaagttgggcgaaggcaagaggctggggtttcagtgattgggttgcagacaaatcaagtgagaggtgtgggaccttgtggtggcttcttagaaaccactgggtaaatttagaaaccactgggttataccaacaaggattgtttgaaaaacactttgcaagggattctagtaacttaggaatttgtttctccacatctcttttttaaagagatggggtcttggtatgttgcccaggctggcctcgagctcctaggccctagtgatcctcccacctcaccctcaggagtagctgggacttataagtgtgtgccaccatgtcccgctaatttttaaattttttgtagagacaggatctcactctgttgcctaaggtcgtcttgaactcacatcctttttaatgcctggtaactttcatactttttaaatgtcagtccattgatgggtataaaatagtatgtgatctttaattcccatttctttactaacccgtgtgattgaatctgttcactctattttaaaggccattctgtttttcccctatgctaatttttatatttatatcatttcccagtttttagtatgttttttttcttgaggcttagtagaatatttttgttgtcttctagacactaataatttatctcttatatgtgttgcaaatatattctcccagcctggcttgtgtttttcaatttacttatgagtaccgttgtacaaatattctaaaagttgtcattgtgatatttatcaacattttccttttataattgtacttgtaaaacgtagtttagaagtatattactggctgggcatggtggctcacacctgtaattccaacactttcagatgccaaggcaggcggatctcttgaggccaggagttcaagaccagcctggacaacatggcaaaaccctgtcactactaaaaatacaaaaattagccaggcatggtggcatgtgcctgtggttccagctacttgggaggctgagacacaagaattgcttgaacctgggaggcagaggttgcagcaatctgagattgcaccgctgtactccagcttgggcaacagagcaagactctgtctcaaaaacaaaaaaagtgtatttcttggctggggacataaatgtaattttagttacattttattttaacttcttaaaatgatttgattctaatagaaaaattatgcatcaacaagctcacttatcaaaacttgtacctggctcttctaatacattttcctattgtttaatactaaacttacaaaaatactaattagtcgattttacatattgacctctcagcttggtagatgattttaaactcaaagccacatccttcctcgattttacctcctataacttatcaatgtgcagtgttgcttttctaaagaccagtagaattctaattaccattcctttgatggaaattctacttccctttagaagcttctggaaatttctatatattcctggtattctgatatttttgcaacaacgatccttttgttcatttattgtgctcatcgtggaatgtcttcattctggaaacccctgtgcctcatctctcaaatcttgaattttttttaataaatactttcatgatactctctgaaacattttttagtcagagatatttttagtcacataaatattgctagtgctggacatccctgagcagagatcttatttttttccgaccttttcactctttttgtccacttttgtatactttttctacttcctggaatagctttgtcttccaactcttctattattgcctaagggtttctttttagctactgatttcaaagaacatttgtcttatcagattttcctttcttttcaagactttcttgatgtatgagtgcaatatcttttatccgagcatattaattttaacatttatagattttctttttttttgtaatttttttctaattgttttatatttttagtagagatggggtttcaccatgttggccaggctggttttgaactcctgatctcaagtgattcaccctccctggcctcccaaagtgctagtattacaggcatgagccaccgtgcccagccttatttcttttcttaagaaaaaatgtggttatttgctgctttcctcctcttctttctttttctcttccactttccctttcttttttctctctttctctctgtctctccctctctccctttcttgctgtccccttcctgtttgagaatttttcttcaatgtcctgtaaatttttgttctccctttgtgtctaaacaaatgctgagacactaagagaaacccatgtgcccgatcacttgtcttcactgtgcgataattgggcagcatgttggcttctgtttttccatgtatttgcatgaggaataagagcatcctgaaaatagaaactttcctataaaatagatgaccatgagaatcaggttttactagatgatgaggtcttatttatattctaaaccatagtaaaaactcccattatgcactaatacagtttgcatatttgtcccctccaaatctcatgttgaaatgtgatccccagtgttggaggtgggcctggtggaaggggtttggatcatgagagcagatccctctgaatggcttagtgccatcctcatggtaatgagtgggttctctatctctaagttcacctgagatctggttgtttaaaagagtctgggaccttcccctgctgtctcttgctcccactctcaccatgtaacaccttggctccccttcgccttctgtcatgagtggaagcttcctaaggccctcaccagaagcagatgccagcactatgctttgtgtatagcctgcagagctgtgaaccaattaattcctcttttctaatttacccagttttaggtaattctttataaatgcaaaatggactaacacatgcaccaagcctgtaattaacagacttgcttctttggttactcacatcttccctaaaggagtgagctttctgggaccatgttattgttaaagatacggaggcaaacagtataagtgtactgatgctgccaaagtcacagagctagtaaatgagagaatcgacattcattcttaggtcactaagcttcatatctccttccctacagaccccattaataaatggccaaaccaatagcttcagggtctcacaagccaatcaacatagacagcagtgccactgagtctatgaccggttaggataatagggcctcaaatactcttatgaatcttatagactcatataaacctggtgtcaacatcatgccactattctattctatctcaataaggactcacccaaatctcatcttgaattgtagctcccataattcccatgcgttgtgggaaggatccggtgggagataactgaatcatggggcggtttcccccatacggtgctcatggtaatgaataagtctcataagatctgatggttttataagaggtttccccttttgcttaggtctcattccctctcttgcttgccaccacgtaagatgtggctttgctcctccttgctttccaccatgattgtgaggcctccccagccatgtggaactgtgagtccattaaacttctttcctttataaattacccagtttcaggtatgtctttattagcagcatgagaaacagaaagatgtccccaagttgctaggaaaacatattggtgcccaatgtcatggagaggttgatgttcctcctccaggggctgtaggatgaggccaccaaaataagcttatcccatctgtggcttaaaaacatgtcctgctcagtggaagttggcactgattttctaggaatgcagaacactcccagcaagagagtgaggagtgggtctcgtgagtcaaatgtttagcctaagctcttgattcacaggtcaagcttaggaaagaagcttacctttggaatatacatatttgcattctaataaaacatttttaaatttttttttgtattttcgtaggctattggggaacaagtggtgtttggttacatgagtaagttctttagtggtgatttgtgagattttggtgcacccaccaaccgagcagcatacactgcaccatatttgtagtcttttatccctcacccccttcccaccctttcccccgaatccccaaagtccattgtgtcattcttatgcccttacatcctcatagcttagctcccacttatgagtgtgaacatatgatgtttggttttccattcctgagttacttcacttagaataatggtctccaatctaatccaggttgttacaaatatcattaattcatttttatggctgagtggcattccatcatataatttatatatatataaattatatatatataaattataatatttgtattatatataattatatacaatataatttatatacattatacataaattattatatatatatacatatatatatatacacacacacacacacacaccacagcttatccactcaattgatggacatttgggttggttccacatttttacaattgcgaattgtactgctataaacatacatgtgcaagtatcttttttgtataatgacttattttcctctgggtagatagccagtagttggattgctggatcgaatggtagttctacttatagttcttgaaggaatctttacactgttttccatagtggctgtactagtttacactgccaccagcagtgtagaagtgttgcctgttcactgcatccacgccaacatctatttttttttattttttttattatggccattcttgtggtttcgatttgcatttccctaatcatttgtgatgttgagcattttttcatgtttgttggccatttgtatatcttttgagaattatctattcatgtcattcatgtccttagcccactttttgatggaattgtttggtttttttcttgctaatttgtttgagttcgttgcagattctggatattagtcatttgtcaaatgtatagattgtgaagattttcttctagactgtgggttgtctagaactctgctgttccttttgccatgcaaaatctctttagtttaataaagtcctagctatttatctttgtttttattgcatttgcttttgggttcttggtcattgtgttgctgtctatctcatttcttaggtctagtggataaaagggcgtccattgtctcctaaagtttttattattttttatttatgctctctatttcactgaagatttctcccctcatttcttgtatctttttttttaatttccttaaattgggcttcacttttctctggtgcctccttgattagcttaataactgaccttcagaattctttttcaggtatatcacggatttcttcttggtttggatccattgctgatgaactaatgtgattttttggggatgttaaagaaccttgtgttgtcatattaccagatttggttttctggttccttctcatttgtgtaggctctgtcagagggacggtctagggctcaaggctgttgttcagattcttttgtcccacaggtgttcccttgatgtagtactctcctcatttccttccgaatttttttaatgaaagccttttatctgttccctctgcagaagggccaaggcgttatcgtcggccacgcacaagatttctctccaaacaactcacagcattgagagaattgcttgaaaagaccatgcacccaagtttggctacaatggggaaactggcttcaaagctacaacttgatctatccgtagtaaaggtctgttcccaagtgtgtctgtaggtagcacgcctaacccagagcttcacacacacttttgatcattgttataacagttcctatttattggcaattgctatgtgtaaggacagatgttaagcactttatatttttattgtcatgagcacccactttattgaggaacactaaagctcacatagaagagctgtcttccaagcattataaacacaagagttggaatttgaacccagacctttccaactccagacccaccatgctacacaggactctttgaggctggatctcagatactcccatttgggtctgttcttgtgtattcaggatgggttctgcttaatcaggaccatcacagtcatccagatgcctgtcactaagttcccacaaagtattcatgggagaacacctggatgaaccctaaagatgacccaagctaaactctcaccccatactctgactttaaaatactttctctgggcaccaggaatggtggctcacacttgtaatcccagcactttgggaggtggaggcaggaggatcgcttaagcccagtttaagaccagcctgggcaacatagcaagaccatgtctttacaaacaaaaattaaaaattaaccagacatggaggcacatggctgtagtcccagctacttgggagactgagataggaggattgcttaagcccaggagttcaaggctgcagcgagctatgattgcagcactgcactccaggctgggtgacagagtggtagcttgtctcaaaaaaaaaaaatacaccactaataaaaacacccttctatttaatacatcacaatctaggtcatattccacccattgctagtacaatcctacacccacttttcccttgaaacccaggacagcagagagtagaaagggcttcccttgttccaataaatgtgagactctctctcacaccaaaaaaccgaattcctgaggaacatgaggatgcccctttatactcaacatccattattaacctcccccctcctccctccttagatctggttcaagaaccagcgtgccaaatggaagaggcagcagcggcagcaaatgcagacacggccatcactagggccagcaaaccagacaacttcagtgaagaaggaggagactccctcagccataactactgcaaacattcgtccagtaagtcctggaatctctgatgcaaatgaccatgatctacgtgagccttctggtatcaagaatcctggaggagccagcgcctctgcgagggtttcatcctgggattctcagtcatatgacattgaacagatatgtctgggggcttcaaatcctccttgggcctccactctctttgaaatagatgaatttgtaaagatctatgacttgccaggggaagatgacaccagcagcctaaatcaatatctttttccagtatgccttgagtatgaccagctccaatcttcagtgtaacttcttacacatcacttctaggggaggtctggatctgacccactgagacatatttccacacatctttaatggtttgaccccagtctaagtagatcaggggctgggaatttatctttttctgtagaaaaaacaataaaggaactcccctacctttcatcattgcctgcattttctgaactccatttgagtgcctcctcacccaaatttcagcattaaagattgtattcagagaagtgacgccaggaacacagtgacataggaggttcctgattgatggactgaataaacgtctgtgcctacatcagttctctctggaagaaagtcagaagtgagtggagagactcctacacaccaggcaactaagaaaatgtcttagcaggccagtcgcggtggctcacgcctgtaattccagcactttgggaggccaaggtgggtggatcacgaggtcaggagatcaagaccatcccggctaacatggtgaaacgctgtctctactaaaaatacaaaaaattagctgggtgtggtggtgggcacctgtagtcccagctgcttgggaggctgaggcaagagaattgcttgaacccgggaggcggaggttgcgtgagccaagattgcaccactgcactccagcctgggcgacagagtaagactccatctcaaaaaaaaaaaaaaagaaaaggaagaaaagacaagaaaaaaaatgtcttatcaaacaggcagcaaaagctgaagcactcagaaacactaaacccaccctgggcactgagccatacaatcaggaaggaatccccagttcccagcttctcccccaggagagaagcagtgaaccacacatatagcaccctaacagttgatggttaagttcctaacgagcctgcatcagggagttgactaggtaggtaaactacagacttacaagagcctgaacagaagctaggtgccacccaaagcttcaccccagctcagcccagcaataaatccaggtctatcaattcctcctggaagaagtttgtccacacattgagcaccccaacttttatacctgcactcaagggactgcatcctaaatcccctagctctggaaatggaagggattaggcatatgtgagtctccctagctcacagagaaaaaggtggttttaagcaggcacacaagcacttcagggctagccttcctccaccacactcccccaaccagagcagtgcagagaaggggtcaaaatgtacagctcccagttactcctcaaaaaggatttgccagcacactcttccagctgctgcttgatagtcatgcttttaaccagcctgtatctggaagtcaacagggcagacaaatgctggatccttgggagcctgaatgggagttcagacactgtccaagccttttgcccttgcttgctctagtggtaagtctacagactctccctggaaggagtttttccatgcagtgagcacccaaatttttgcagcttccacggcatcctaaatcacctatctctgggaactgaagggatttgacattcactagtctccctagatcacagcaaagaggtgattttaaactgatgcacaagcatttccaggagatgagaatagtcccagggacctgaggctgaacacacctagctggccactaccacctcaggtggcatctacttgcatgtgccacttacaggcctggagactggcctgctcagcccgtcacagccatcaccaacactagcacaagctgattgggagctagattgtcctgccaatattactgccattgcccatgccacccttgctgcccagtggccccaggaactacgcacctacctggcctacggctggcaatgccagcacccaagaaagccacctggaagcctgggaattggcctacctaaacctgctaaacctgtgccagcgtacaccaccctgggactcaaggacaggctcaccactgccaccactgggcccgaaaaccggcccacctgacatcccctatcccagaaaagcttcacagcctccaccaacaactgcaccttaagccacggaggaaataacactactgatgttgcttacagccaaataaatcatacagagactatacctggataaagaattcaaaataatgatattaaagaagctcagtgagatacaaaagaactcagaaaaataatacaaacaaatcagaaaaacaattcaggatatgaatgagaaatttaccaaagagatagatataaaaaagaaccaaacaaattctggaaatgaagacttcattgaatgaaatacaaaatatatttgaaagcttcaacaacagactaaatcaagtagaaaaaagaatttcagaacttgaagccatatcttttgaaataacccaggaagacaaaaataaaaaagaatttaaaaagaatgataaaagccttcatgacatatgataccataaagcaaccaaattttcaaattactggggtcccagaaggcaaagagagagaaaagggtaagaaagtatttaataaaataataggccaggcacagtggctcacgcctgtaatctcagcactttgggaggccgaggagggtggagcacctgaggtcaagagttcaagaccagcctggccaacatggtgaaacctggtctctactaaaaatacaaaaattagctgggtgtggtggtgcacacctgtagtcccaactacttgggaggctgaggcaggataattgcttgaaccaaggaggcggaggttgcagtgagccgagatcacgccactgcactccagcctggcaacagagcgagactccatctaaaaacaacaacaaaaagtgtgatttatacacaatggagtactatttggccattaaaaaataatttaaaaaaatgaaatcctgtcatttgcaacatagatgagcctaaaggacattatgttaaatgaaataaaccaaacacagaaagacaaataccacatgatctcatacacatgtggaatcctaaaaggtggatctgacaccttacttacaccttactcctgcaagaatggccataatcaaaaaataacaaaatcaaagatcaaaaaatcaaaaaataataggtgttgtgcatgtgtgaaaagggaacacgtttacaccgttggtgggaatgtaaactagtacaaccactggagaaaacagtggagattccttaaggagcaaaaagtagatttaccatttgatccagcaatcccactactgggtatctacttagaggaaaataagtcattatacaaaagagatacttgcacacacatgtttatagcaacacaattcacaattacaataatatagaaccagcccaaatgcccatcaatcaacaagtggataaaggaaatgtgagatatatatatatatatatatcgcacataccatggaatactattcagccataaaaagggaatgaaataatggcatttgcagcaacctggatgagattagagaccattattttaagtgaggtaactcaggaatggaaaaccaaacatcatactttctcactcataagtgggagctaagctatgaagatccaaaggcataagaatgacacaatggactttggggattcaggggaaagaatgggatggaggtgagggataaaagactacatattgggtacaatgtacactgcttgggtgatgggtgcaccagaatctcagaaattgccacttaggaaattattcatgtaaccaaacaccacctgttcccccaaaaacctactgaaataaaataataaaaataaataaggctgggcgcagtggctcacgcctgtaatctcagcactttgggaggtcaaggcgggtggatcacctgaggtcaggagttcgagatcagcctggccaacatggtgaaacctcatctctactaaaaatacaaaaaaaaattagctgggcatggtggcgggcgcctgtaatcctagctacccaggaggctaaagcaagagaatcacttgaacccggaaggcagaggttgcagtgagccaagatcgcaccattgcactccagcctgggcgacaagagggaaactccgtctcaataaataaataaataaataaataataaataatttaaaaaaattgaaaaaataaatacattttttaaagtggacctcatagaagtagagagtagaatggcggttaaaggaatctggggtcattgggggtaaaggggagttgggaagacactggtcaaaggatgcataattacatttagatagaaggaataagttcaagagatctattggacagcatgatgactataattaatggtgatatattgcattcttgaaaaatgctaagagagtagatgttaggtgttctcaccacaaaaaaatagatgataactatgtgaggtaacacatttctttaaattagctgatttggccaggtgcagtggctcacaactgtaatcccaccactttgggaggctgaggcaggaggatcacctgaggtggagagttcgaagaccagcctgaccaacatggagaaaccctatctctactaaaaatacaaaattagccaggcatggtgtcacatgcctgtaatcccagctagtcaggaggttgaggcaggagaatcacttgaaccctggaggcggaggttgcagtgagccgagattgcgccattgcactccagctggggcaacaagagtgaaactccatctcaaaaaataaataaataaataaataagctagatttaaccattccacaatgtatacatatttcaaaacattatattgtacaagataaagtcatacaattttaaaaaacaaataaatttagaacaaaatgatagggaaaggtattaggggctgagtggtatatgggaactgcgtactacctgctcaattttctgtaagcctcaaactgcttcaaaaaataatgtctattgccaggcgcagtggcttacgcctgtaatcccagcactttgggaggctgaggtggtttggtcacctgaggtcagaagttcaaaccagcctgaccaacatggtgaaaccccatctctactaaaaatacaaaattagccgggcatggtggtgcatgtctgtaatcccagctacttgggaggctgaggcaggagaatcgcttgatgctaggaggcagaggttgcagtgagccaagatcgcaccattgcactccagcctggacaacaagagtgaaactccatctcaaaaaaaattataataataatgtcttaattttaaaaaaaaaatgtctagctcggccgggcgccgtggctcatgtctgtaatcccagcactttgggaggcagagatgggcagatcatgaggtcaggagttcgagaccagcctgaccaatatgatgaaaccctgtctctacttaaaaaaaaaaaaaattagccaggtgtggtggcatgcgcctgtagtcccagctactcaggaggctgagacagaagaatcgctttaacctgggaggcagaggttgcagtgagccaagatcgtgccaccgcactacagcctgggtggcagagcgagactctgtctcaaaaaaaaaaaaaaaatgtctagcttgatcttaaaggaatgaatgattccctaagagaacttagtgagggctggagcccttgagttccaccagccaatcccaggagttagctgtaaaagtcactactcacctttgcaaaattcaacttgatcaggtacctctcctttagtttcaggaagaagaagcaagaacctttaaataattaataagtaagtgactgatgtgaagaaacgctgaggctctaaagctggatggaacagagactggactattctctgaccatctaagtctatgcagctataaacaagaaggtaaagctgcaggggctgacctggaggcctcaagatgtatcgataaaccaggatggtagcagctgcggaactgtgaggtgcagcggtccccaatgtttttggcaccaggaactggtttcgtggaagaaaatttttccacagacggcagcggtggggtgggtgggttggggtgggggattgtttggggaaaattcaagcataatacatttattgtgcactttatttctattattattacattataatatatcatcaaataagtatacaactcaccataatgtcaaatctaatgggagccctgaacttgttttcctgcaactagatggtcccatctgggggtgatgggagacagtgacagatcatcaggcattcgattctcataaggagcatgcaacctagatccctcgaatgcgcagttcacaatagagtttgcgctcctgtgagaatctagtgcccaagctgacctgacaggaggcggagctcaggctgtaatgccagcgatggggagtggctgcaaatatagatgaagctttgctggctggcccgctgctcacctcctgctgtggcggtctggttcctaacaggccaccatgggtacccgtctgtgggggtggggagcgggggtgttggggacccctggtatagagtgctctcttgtaacccacccatcctctgagtgcagatttgcaaatacaaccacgttctctagaagggaccctatgagctggaggataagaccacagcctggagttttgcttttgactttcgtaatgtttaggcattttttatggtgagcatagcttacttctgaaatttaataaacgactgtattaagcggtgaaatagtgagtacacggttgtttactttgttattctgtttgcatgaacatttaagaaaaataaaacattgagaattgttggtggcaggtgtggtgggagctttttaaaacaacaacaacaacaaaagctgttccctacatgtaacagggatgtctgtcttcggaggaattggtgagctgcatctcaccccccggtgaagcaaggggtcgtggtggtggaacttgactgggaagtgggaactgatcctggggagcaatcccagaagcctggggctaagccatgtcctgagagtttgggaaatgaatgtattaagcagcccagatgcctaactccagggtcaccaccagcctttgagctccagggggcgctccgcgaacatcccatgaaagcgcgcggggcgcttgggatgatgtttgcaggggaactgagccaggctgtggtcctctgtgccatctcctgccggtgggcagcactcctgttgtgcacagggacccctgtttcctaggtccacaaactggtcgggaaacacgagttgacccggccgccccaacctgctttctaacaagaggttctgtccaagttccccgctcgactttcaatatgtcactcagcgcttaagcctcaccccttatccttgatgtccaatcaggagcgagggttggatccccaggggcctggggaggcagagggttctttttttttttttttaaacctaaaaatttaaatgaagatgaaaatggaagattcttcatggaagttttaatggcaacaattagtctacgaaaaaataggaagtctgaatggaccaataaccaaagaacttacaaaggaagtaaaagatctaagaaagtcctagaaggttttatgggcaaattctgctatacattccgacaaatcgtaattgtactgtctccttaatttttctgtaaatctaaaaccattctaaaataaaaaatttattttaaaaatgtatccaatccccctcgtccaaacctttgaaatgctaaagatttcttttaaaaccctcaatatctctgattattttgttaaggtttttgtttaagactatctattgaaggcagggcacggtggctcacacctgtaataccagcactttggaaggccaaggctggaggatcacctgaggtcaggagttcgacaccactctggccaacatggtgaaaccctgtctctactaaaaatacaaaaattagccaggcgtggtggccctcgcctgtaataccagctcagctactcaggaggctgaggtgggagaatcgcttgaacctgggaggcggaggttgcagtaagccgagatcgcaccactgcactccagcttaggcgagagagggagactcctctgtctcaaaaaaaaaaaaaaaaaaaagagagagagagagcatctattgaagagtgagttttcttacaatgcccaaagcaactgtctccttctttccctggccctctccatgtctgtattcacatagagtctacataatgggcaaattgtgattaacaactttgtctcctgcctttaaaaaaaaatcctaaaatcctatcatactccaggccgtctccacgtctgcttaatgaactgtcttaatttttatttatttatttatttatttatttatttatttatttatttattgagacagagtctcgctctgttgccaggctggagtgcagtggcgtgatcttggctcactgcgatctgcgcctcccgggttcaagtgattctcccacttcagcctcccgaatagctgggattacaggcacgcgccgccacacccagctaatttttgtatttttggtagagacggggtttcaccatgttggcaagatggtctcgattacctgacctcgtgatccacccgcctctgcctcccaaagtgctgggattaacaggcatgggtcactgtgcccggccgaactgtcttaatttttgagagtaggtttattacactgctcgatggacaaaaaaattgggcactcttctaaagctcaggggaaagggtgccaagagaggagtcccagggaagagatgttcagagaacatcataccaccccacctgctctcttttttttttttttcttcaggaaatgaggtctcattatgtttctcaggctggcctcgaactcctggctgcaagccatcctccctcctcagcctcctgagtagctgggattccagctgtgagccaccacgcctggcttgacttttataatgccttctcctttgacagtttgaagcctcttggttaaagcaaagggggacctggagggtgacttcagtgggaagcgggaagagtgactggaaactggtcccttctgctgcatgtctcagtgtaagtgtcaagaagtgctggggtaacgttagccacttcctctctgcaaccagcccccaggcgcttcacttctctctttcctccacctgagatgacacagttgtggttaaggccctggaccaagaggttagcctaaatgagagtcccatctctgcaacttctacctggatgaatttgagcaagtgattcacctctctgagcttcggtttcctcatctgggaaattgagataataacagttaatgtctacatcataaagttgttgtgataactaaataaaaacgtcatgataattaaataaattaaaatgtggcccgggcgcggtggctcacgcctgtaatcccagcactttgggaggccaaggcgggcggatcacgaggtcaggagatcgagaccacggtgaaaccccatctctactaaaaatacaaaaaaatagccgggcgtggtagcaggcgcctgcagtcccagctactcgggaggctgaggcaggagaatggcgtgaacccgggaggctgagcttgcagtgagcggagatcgcgccactgcactccagtctctgggcgacagagcgagacttcgtctcaaaaaaaaaaaaaaaaaaaaaaaaaaaaaaaaaccttgtcactttaatgttttactttattggaaagagattgttaaggattccagctagttgtttctggatagcagaaatgactagccttcttggaacagatcttctgtcttctgaaaaagtcactagaataactcttcagtcacacacatgtaaagcaagtgtttaccccaattgctaagaacccaggaagggaaaatcttaagggatgtgggtattctgggagtaaacagattgacagccacactccttcactttgagatacaaaagttctaaaacatttctgttaaaccagagtggtcagctctcatgagaggatcgaggaattgctataggaaaactcaccataatggttaggggtgtgtgtgttagtagctcagacacaggtaccttagagagctggtattagctaggaaggactactgatgggttgaatttgtatcccctgtggtaagaggcataacaagctgatttctaactgagggtagaaagtgactgtgttaacttggggctgctgcaattacaggaccacaagctgggtggtttaaacaacagaaatttattgtcttgcaaatctggaggggagggtagaagtcaggaatcaaggtgttggcagggctgcaccccctctaaaggctctaggagaggatcctttcttgcctcccccagtttctggtggctccacgtgttccttggtttgtgacagcagctctcccatccctatagagagaaagtagatggtggcttagggatggggaggatggagtgacaggggatgatagctgaagacataaggtttcttttggaggggatgaaaatctaaaattgatcatggtgattgttgtccatatctgtgaatatatgaaaaactattgaattgtatactaaatgggtaaatgttatggtttgtgaattgcatctcaatgaagttttttttaaaatgacacaaacttgagataagagcccaactttattcttttgtatgtggccatccagttgtcccagaaccatttgttaacaggactatcacttccccactgagtaatcttggcaacctagtggaaagtcagttggccgtagacacgtggttttatttctagattctacttctatccttttgatctatatgtctgtcttcatgtctgtaccacactgtcttgattacttttgccttaggttggtacaaaagtaatttcagtaaattttgaagttgggaagtgccagtcctactttgcttttctttttcaagattatattggttattctgggtcccttgcgattccatatgaattgtacattcagcttgccaatttctacaaagtcagctgagattctgacagggattccactgaacctgtagatcaatttagggagtattgccattttaacaatacaaggcttctgatccatatacaagagagattttttttccatttatttaaatcctctttcatttctttcaacaaaatctcaccatttttagagtataagttttgcatttcttttgctaaatttattccgaattttttattggttttgatgctattgtaaatggaattgttttcttgatttcgttttcagattattcattgcaagcatatggaaatacaattgatttttatatattgacctggtatcctgcaaccttgctgaacttgttcaatagttctaacagttatttgctggacttcttaggatttttctatatacaagatcatgtcatctgcaaagagtttacttcttcctttcaatctggatggatgctttttttttttttttttcctttcatgcctatcctgactagaacctccagtacaatggtgaagtggtggaagcagacacctttgccttgttcctgatcttcgggggaaagcatccagtctgttttcactaagtatgatgttagatgtgcttcgtagaggccccagtgtcaggttggggaagttctcttctattgttaacttcctgagagtttttaccatgaatgggattttgctaaatgcttgttttgtatctattgagatgatcatgtggtttttgttttgtattcaactgataggatatactatattaattgatttggggatgtaaaaccaatcttgcattcatcctgtgataaagctcatttttcatggtacgtacttctttttatatattactggattccatttgctagtatttatttgaggatttttgcatctgtattggtaaaaagatattgggctgtaggtttcttgtggtgtctttgcttggtcttggtaccagggtaatactggccttaagaatgagttgggcagtgttccctcttctatttattggaaacctttgtgaagaactgatattaattcttcttcaaatgtttggtagggtcagtggtgaagggcctagggttttctttgtgggtagtttttatattattaattcactttctttgcttgctatagatttatgtagatgtcctatttctcttagactcagtttcagtagtttgtgtctttctagaaatttgtttttcatctcaagtatctagtttattagcaaatagttgctcacagcatttatttctataaggttggtagtaatgtctcctctttcatttctttttttaaaaatttaaattttattttaattgaaaaaatagtaattatatatatttatggggtacaatgtgatgttttgctatgtttatattgttaaatggttaaataaaactaattaataaatctgtcacctcacatacttatttttcatgatgacatttatgataagtgaaataagccaggcacagaaagacaaatagactccatatatatgtgagatacatggaatctaaaagagtcaaactcacagaagtggagagtaaaatggtgattaccagaggctggggaggaagatggatggggaaagggaaactgttgatcaaaaggtacagtttcagttagacaggaagaataaactttagtaatctattgcataaaatggtaattataataaataataatttattgtacatttcgaagtccctttttcatttttgattctagtaatccagtctgctattttttcctggtatatctagccaatgttttgccaatattttggtttgtaaaagagtcaactcttggtttggttgattttctctattgtttttctattctctatttcacttatttctgctccaatcttttattattttctttttctacttgctttatgtgtagcttgctcttctttttcagtgtcttaaggtgaaaatttaggttattttcaatcacttccttaatataggcatatacatctatcagatttcttttaagcactgtttttgctgtatcctacaagttataaggtatattatgtcttcattttcatttatatcaaagtattttctaagtcccttttaatttcttctttgacctcttggttatttaaaagtgcattgtttatgagaacatatggacacagggaggggaacaacacacattggggcctgggggtgggtgaagggagagcatcaggttggatagcaaatgtaatgcatgcggggcttaatacctaggtgatgggctaacaggtgcagcaaaccaccttggctcaggtttacctatgtaaaaaacctgcacatcctgcacatgtatcccagaacgtaaaattaaattaaattaaaatttaaaagagagtgcattgtttaatttccacatacttgtgagttccccagatttctgtcttttatttatatataatttcattatgttgttatcagaaagtatgcattgtatttctactcctttaaatttatcaaggtttatggcctagcatgtggtttatcctggagagtgttccatgtgcacttgagaagaatacaaattctcctgttctacagatatctgctaggtctagttggtttatagtgttgctcaagtgttttatttccttattgattttctgcccaattgttctattcgttatttttttcctgacttgaggtatgactgacaaataaaaattgtatatatttaagatgtacaatgtgatgttttgatatacattgtgaaatgattaccacaactaagctaattaatatattcatcatctcatatagttacaacatttttttaaagttgggtatcaaaatctccaaatattgttgcttattgtgtatttcttcatttctgtcagtatttatttaatgcatgtcggggctctgttgttggatgcctatgtgtttataattgttacatcttcctgatacagtgacctgtagatcataacatatttcttatgtctggtaacgttttttaaagtctattttgcattattagtatcgctgttccagcttccttgtggttgctgtttgcatgatatatcttttttctttctattactttcaatattttgtatctttgaatctaaagtttgtcttctgtacacagaatatcattggatattgttttttaatacagtctgaaagtctctgccttttgatttattcaatccattcacttttaaagttattaatgatatagttagatttacatttgccatttcactttttcttttctatgtcttatgtcttttttgctcttctattcctcctttatgttttcttttatattaagtgaaagttttctaatataggattttaatttctttactgattttttcactaatttctgaattatttcctccgtggttgctctacggcttatcatatacatcttatcaaaatgagcttcagatttatactaacttaatcctagtgagatatagaaacattgttcctatgaagctctattgccttttcccactttttgttagatgttatacatattgcatcaaacattataaacccaggaatgcactgctttaattatttttttatacactttttttttttgagaccgagtttcactcttattgcgcaggctggagcgcaatggcgcgatctcggctcactgcaacctctgcctcccgagttcaagcgattctcctgcctcagcctccctcgtagctgggattacaggcatgcgccaccacgcccagctaattttgtatttttagtagagatggggtttctccatgttggtcaggctggtctcgaactcccaacctcaggtgatccacctgcctcagcctcccaaagtgccagccctattacaagcgtgttaattttatcgtgagaagaagctgttactcttactgggggttcccttgtaagtgacaaggcattttcttttttctgctttcaatttttttccttgtccttggctgtcagtattcttaccaagatgtgtctgtgtgtgtgtgtgtctgtgttcattctacttgaagttcattcagcttcttggataggtattttattgtttttcaataaacttaggaagttttaagccactgtttattagaacaatttttctgtttctttctctttcctctccttctgccattcctattgttttgcttaatggtgttccacatttctctagggctctacttattttttcatctttgttctttccccccattctttggattgcattatttctattttcttttctttttcttttttttttttttttttttttgagatggagtctcgctctgtcacccaggctagagtgcagtggcgcaatctcggctcactgcgttcaagtgattctcctgcctcagccccctgagtagctgggactacacgtgtgccaccatgcctggctaagttttgtatttttagtagaggtggggtttcaccatgttagccaggatggcctcgatctccagacctcatgatccgcctgctttggcctcccaaagtgctgggattacaggcgtgagccaccacacccagccttatttctactttcaagtttgctaattcttctgtcaattcaaatctactattgagcttctctagtatatttttttcatttcggttattatacttttagctctcgatttccatttggttttattttataatgtctaactttttagcgatattttttatttgaccatacctttcctttccttttttaaaaaaatgggtttcctttagttatttgaacagatttataatggctactttgaaggctttgtgtgctcagtctgacatctggttgctttcactggacgtttctgttgcccgctttttttccagtgtaagggtaacatttcgtttcttccagaacccatagcacttctctttcctaactagcattgtccagtaaaacacctgtagtgatagaaatgtttatatctgccctgtccaatgtaatagccactagccacatgtggctattgagcacttgcaatgtggctagtgtaactaagaaagtgaattttaaattttatttcatttcgattaagcataaatagccatatttaacttcaagaagataagtggctatcttcttgaacaatgcaattgtaggccatgctcagagtaccaattccttagaattccctactcaaatgttcccaaacctgcttccagcaactgtttgggcctcttcctagtccatcttctacctgacacccagaacagatcatgctggtacgcacaccccaaacccaaggggtaggcaagaggtgatgtggggtacatgcaccaagctccaatgtgcaggcttggtatccacatacatgcatgaataactccttaggggtacaggacatcaacaaggaaggcaagagaagggagtaagctatagatagggcgcctccatttgtactctttgtccaggatccacaaatgctagagatgtctttgactggtaatgtcccatttcttagctatgtgatggctacatgtgtgttcactgtataattttttgactctatttatatgtacaaatgtgcacgtgtgtatgtgtataggtatacacatatatgctatatttcacaattctttaaaatgattaaaaaatttttaccactattaggataaagtcctagctcgttccatgatatataaagccttgtacaaaccatcttctgcctatcttggacctgatctcctgccattctccctctctcctgtcacctctagtcacactgacctttttgctccagccaacagtgccaagttacagagctgtttgttggaggaggtttaattggccctgcatttaaaaccatttgtattagtgaggcaaagaaatgcctgcgatgggggttgcatgaggactggaatgagcagccacagtgtcagaagtgatgtggcaactgcagcctcccagagtttaggaggaaagacatctgcttatataagaaagctggagacagttctgaaggctgccaaaaaaggaacacttgcaactgaaggaaccatcaatcaggtgccctgaacaggtggaggctggggctactctcagcggaaagccaggctcagagctccaattaccagccatgaggaatccaactatcaaaactgatgccagaggggagggagaggaggagacagaggcctgactcagcggaaagagcgattccagagcacctgaggtaactgacgaaccaccagagaggagttggagatcaataacagaaatatctaactcagtggttctcaaagccagatccccagaccagcagcatcagcttgaccagggagctggttagaagtgcacattctcaggcccccccttggtaagaatcagaaactctaaggcacagggagggaccagtaatccctgttttaagaagccctccaaggtggcttttccaatgttggataaattctgagagccataaatctaactttaattgagcgtggactatgtaccaggcgctattctgagtgtttgcctctattaactgaatattccacataatggcatcatgaaatagaaggtgaaccattttacagatgggagctgtgagacaggataatttatgtaacttacctaaaatcagagagccagacagagggagagatgcaatctgaacctcaagagcatgtgctcttccttcaccactgggctctactgcagtgttgctcagaccttagcacacaactcctggggggcttctgaaaacactcctgctggaaccccttggtagagtctgtgattcactagaattggggctgagaatttgcatttctcacaaggccagatgattcggaggctcctggtccaatttcactctaggagaaccattgtgccatgttttaccaccttccccacctgaggatttagtccagcaaatggaaatgttgattgaggctttttgagaaaatccatgtgcagagccccttgccgggactcttttggctacaaatgacagaaaaccctgttctaattgtcttaagcaaaaatggtatctataggccacttgaaacagcctaagtctgcctctaggcacagctggacctaaggatccaggaggtattaacagttaggattccctctttttctctccatctctcagctcagctttcctctctgccttcattctgttgtcttcattctcccctcacaatggcccccagcaactctggccttagattccaccaggtagaaacccccaagtaccccttcctattatcccatcagaagtacacgctggctgtcattggccagacatggatcacaggcgcatttctgaacaatcattgtggtcaaggaaatgtaatgttcttattagctaggcctgggttatgggctcacctctaaagagcagaaagtgggctgagctgcactaaaagcacacagatcaagagtagggtagaagaatcgggtgctggggccaaaaaaggaaatgaatgttgagcaggcaaatataaccaatgtccactacaccatcctcaaaggacaaaatgtgttcaacattaaactctcaaaggatgggcccaagcacagagatcatgatcaaagggaaaacccaggccaggtgctgtggctcacacctgtaatcccagcactttgggagcccaaggtgggaggatcacttgaggttcaagaccagcctgggcaacatagtgagaccccgtctctacaaaaaaaaaaaaaaaaaaaaaaaaaaaaggccaggcatggtggctcacacctgtaatcccagcactttgggaggccgaggcaggtggatcatttgaggtcaggagttcgagaccagcctagccaacatggtgaaaccccatctctactaaaaatataaaaaattagctgggcgtggtggcaggtgcctataatcccagctactcaggaggctgaggtgggagaattgcttgaacctgggagacagaggttgtagtgagctgagattgtgccactgcactccaccctgggccacaagaatgaaactctgtctcaaaaaaaaaaaatttttttttttaatttagcgggtgtggtggcacatgcctgtagtcccagctgctagggaggctgaggtgggaggattgcttgagccaaggaatttgaggctgcagtgagctatgatagtgtcactgcacttcaggctttctcttggggtctctcgcgtggctatagtcagatagtgacgggagctggggtcatctcgaaggcttcctcacacacatgtctggcagttgatgctggctgctggccagaatacactcatgtgaaccatccatgcggcctgggcttccttccataccaatttgtttccaagggtgagcatttcaagaaagagaaccaggcagaagctgtgttgcctttttgtgacctggcctcagaagtcacatagtgtcatttctaccatactctcctggttgtcttgatgcctaggatcaagaggagtggttacagactccagctcttggaatgggagtggtacatgatcagaagagcagggggaatgggagacattgattgtcaccgtcctttttgtaaaataatatgccacagggaggcaatgactggaaggaaggcatgcgggggattctggggggctattagtgctgtgttttttaaatctgcatgctgctcacagccagttgcataatttttttctttttgagacagggtcttgctctgttgcccaggctggagtgcagtggtgcaatctcagctcactgcaacatccgcctcgcaggttcaagccattctcgtgcctcagcctcccgagtagctgggactacaggtgtgcaccaccacgtctggcaaacttttgtatttttagtaaagagggggtttcaccatgttggtcaagctggtctcgaattcctggcctcaagtgatctgcccacctcggcctcccaaagtgttgggattacaggtgtgagccactgtgcccaacccagttgcctaatttttaaactacaccacaatgtcatttccagagttccagacttccattaattccttcaaatcttagctttactgtcctctccttcacaaaaccactaatgacatcctacactccctcaataacctctgctctctcagctccatgaggcctagtgatacctctattatagtaaatattaccttaccttaaattgtccaggttatgtgtctaccctccactctaggacagaagtcctcaatttttttttttttttttttttgaggcagagtttcactcttgttgcccaggctgaagtgcaatggcggatctcagctcactgcaacctctgcctcccaggctcaagcaattctcctgcctcagccttcccaagtagctgggattacaggtgcccaccaacacacctggccaattttttgtatttttagtagagacggggtttcaccatgttgaccatggctgttctcgaactcctaacgtcaggtgatctgcccgcctcggcctcccaaaatgctgggattacaggcgtgagtcaccgcgcccggccgtcctcaaagattttttatcacatccatgagctgcatctccgctgtatgtatgtgtgcgtgtacatatatacagatacagtggtaatttacaaactgtacagtattaataggcacaatataaaacatgcgctaagacagaaatgcttaaaggatgagacaaaattggttgtactcacgcctgtaatcccagcactttaggaggccgaggcggacagatcacgaggtcaggagtctgagaccagcctgaccaacatggtgaaaccctgtctctactaaaaatacaaaaaaaattagccgcttgtggtggcacgctgctgtattcccagctactcaggaggctgatgcaggagaatctcttgaacccaggaagcggaggtggcagtgagccgagacggtgccactgcactccagcctgggcaacagagtaagactccatatcaaaaaaaaaaaagtggttgtaaatagactttctaatattttcctgcacctaaaatgtttgtcttgaaaacccccagaaaaccaggaccatcttcagagactattaccatgaccacaaattccacaaggacaggtaacaatctgtcttactcacctcagtatcccagccactgaatgagatgtgaaaatgtattcaattgtacaccaaacatgtattacagaatgggagaaaatatttgcaaactctccatctgacaagggattaataaccagaatataaaaggagctcaaacaactcaataagaaaaaaaaacttataaacttatttaaaaatggccaaaagatctgaatagacatttctcaaaagaagacatacaaatggcaaacaggcacatgaaaaggtgctcaacataactgatcatcagagaaatgcaaatcagaattacaatatcatctcaccccaagtaaaatggctttcatcccaaagacaggcaataacaaatgctagtgaggaggtggagaaaaaggaaccctcgtacacagttggtgagaatgtaaatcagtacagctactacggagaacagtatagacgttcctcagaaaaagtgaaaatagctgggcgcagtggctcatgcctgtaatcccagcactttgggaggctgaggcgagtgggttgcctgaggtcaggagtttaagaccagtctggctaacatggtgaaaccccgtctctactaaaaacacaaaaaaattagctgggcatggtggtgtgtgcctgtaatcccagctactccgggggctgaggcaggggaattgcttgaaccatggagatagaagttgcagtgaacagagatcgcaccacggcactacagccaggcaacagagcgagattccatctcaaaaaaaaaaaaaaaaagaaaaagaaaaagaaaaactgaaaatagaactaccatatgatcctggcagaatcccactgctaggtatatatccacaagaaagaaaatcagtatatggaagagacatctccactcccatgtttgttgcatcattgtttacaagcgcccaaatttggaatcaacctaagtgtccataacagatgaatggataaagaaaacgtggtgcatatacacaatggagtactattcagccataaacaagaatgagatcctgtcatttgcaatgacatggatagaactggaggacattatattaagtgacagaagccaggcacagaaaggcaaacttgacatattttaactcatttgtgggagctaaaatgtaacaactgaactcatggagatagagagtagaaggatagctgccacaggctgggaaaggtagtagaggggagaggaagtggagatagttaatgggtacaaaaatacagttcgacaaaatgagtatctagtatttgataacacaacagggtgactacagtcagaactgatttgttgtacattttagaataactgagggagtacaattggagtgttcataacacaaagaaatgatgaatgcttgaggtgatggatgccccatgtaccctgatgtgattattacacacacacctataccaaaatatctcctggaccccaaaaatatgtacacctactatgtacccacaaaaatggaaaaattaaaaataattttgaaaagcttacttaagaaaaaaacaggtaaaattttcaaagctagaggacatcagagaaaaagtcaggatatagtaaaaaaaaacatgaaacttaagccacttctggccctcccatcagaaagcttgatgccagatgaagattgcagccaagagccctggagagggggtggcaccgtggagagaaagagaagcaagaaaagaaggggtttggtgctaggtagttcttggtgatgagtcataactgactgcaaaaagtcagcgtaaatagacacttggtgaaggccgggcgcggtggcttatgcctctaatcccagcactttgggaggccaaggcaggtggatcacctgaggtcaggagttcgaggccagcctgaccaacatggtaaaaccctatctctactaaaaatacaaaaattagctgggtgtggtggcgggcacctgtaatcccagctacttgggaggctgagacacgagaatcgcttgaacccaggaggtggaggttgcagtgactgttaaaaaaaaaaaatagatccctggcggggcacacatactgctcctcccatcaagggatggttggcataccttggcttgaatccaggttgcccttagtgacttacttgaccaatataattcagaggaagtggcattctgggacttccgaggctagagcataagatgtgtggcttctgattgagctttttggaaagctcagtcttggaatgctccctctcggaacccagtcatcacactgtgagaggcccaagtcacctggagaggttatgtctggcattccaggccacagccagcatcagcttccagccatgtgagtgagccatcttgaccttcagagtggggcctttagataactgtggtcccagctgatatccaactgcaatggcatgagaaccgcccagctgagcctagtcaacctggagaaccatgagtgataataattaagttgttttcaacagcaaaatttggtgtagcagtagataacttaaaccgtgggctgcctccaacagcttctgtaaatatcgacaactttctcctgatcttaaatgtatgactgcaatgttggaaatctcttaaaagtgatgggtggaaacagcagtgtgtctgggcacagaaggcttccaatggatggcaagaccaagcatgataatctgtggtctcttttagagcccactcggtaaaatgggggacctggaaccaacctcgcagggatgttgtaaggattcatgcagttaaagcctgcaacgcaggtcctgatgcatagtaggtgcctcctaaaatgttagttttaacgtgtgtatcatgtggatcactagttaacatgtgtttgactgcagctaaatggccccaaatcagcagtgcagtggctcacacctgtaacccaacactctgggaggccgaggcgggtggatcacctgaggtccggagttcaagaccagcctggccaacgtgaggaaaccccatctctacttaaaaaaaaaatacaaaaagttagccaggcatggtgttgcatgcctataatcccagctgctcgtgaggctgaggtaggagaatcgcttgaacccaggaggcagaggttgcagtgagccaagatcatgccactgcactccagcctgggcaacaagagcaaaactccgtctaaaaaaaaaaaaaaaaaccaaaaggggctgaacaaaaaaggaactgcattgtttcacatagcaagaaaagcagaggtgggttccagggttgttaaattcattaatttatctattcaaacattttagttctacttcagtaaaaattttatttaaaaatacatgagtaccaacccattgtcaggcactgttccaggatctggagatatagcatagaagaaagcaaagtcccttaggtggttcagtgacattatcaagaacttaggtcctttgtcttttctgcactgccatcttcagcatgacacctgcatcaccagatggtggccaccgccccggcatcacccgcttacacggcatttccagggacagaacagggagtctgctctagcctctctctctttttgtgattcaactttattgagatataatttacatgcaataaaatatatccactttaagtataaaatgcaataaatcccaaaagtttccctcatcccttgtgattttaagatacagttttatcacatatttttgtatgcttaaaaatgtttccttttgcttggctttgagctttataaatagtatcatcctatatggagtcttttgttttattcacattatgtttctgtaattcttttttttttttcttttttttttttttttgagacagactctcaccctcttgcccaggctggagtgcagtgtccaggatcatagctcactgcatcctcgacctccaggcctcaagcgaccctcccacttcagcctcccgagtagttggagctacaagcacacgccactgagcccagctaatttttgcattttttgtagaaatagggtttcaccatgttccccaggctggtcttgaacttctggcctcaagcaatcctcccgtctcagcctcccaaagtgctgggattacaagcaggagccaccatgcccagcctaaattcatctttttcttgtacatctgttgttccttcattttcactgctgtgtaattgtccgtcatgtgagatatactaaaatttatcaattctcctttaaatggacatcagatgtgtttctttttgctatcagataaatgctttacaaaagcatacaaaagttgacagatgaactttgtatacttgatcttagccaaaggctgagaagagatactatgaactttaacatctcaatcgatgcatgtggtcaaatatctcttcttgggtaaggacctaggagtgccaagcatatgggattcagattttcaatttggttcagtttttcaaaataacaacaaactacttcccagagggttgtactaatttgaactcccatcagcaacatatgagatgtcctgtgaatccccatcctcacctacagccatcttaacttttgtcaatttgaggctgtgaaacagaattttagtgtggcctttttttctttagatgttccatataattaggggctggcttttagtcagatggctgggaccaaacgattgaggaggaagggaatttagagggtgactgtaatgatgaatctataattggtaggggacagtgggcagggtgggatggaaaaaggagagccatgatggacagggagagtgtgggaacgtggcctggaggttgcgctggaagcagaggtggtacttgaacaagcaagctggaaggagaggaagtggatttcagtttcctgatctttgtcttgctctgattagggatgagttggaacatcttttcatgtcaattacaaaactactgaagcaaccaaagaatctcaaaggaaaagaccgacagactatttttaaaattactttatttaaagcaatgtttctatgcaatttaaataaaagaaatctctggagaaaaaaaaaatctctttatcacaatctatgttgtacccaaaactgatataacttaacaaagaaaagaccaagcccccgttcaggaatgtgccattggtaaagggcaaatcctgagaggagctacagggtagctcagagacaggtgggcagagcaattctacagaaggcagatgtgatccatggcatggctactgcacgcccagcaggagtcgaagcagcaggagatgctgtgctggtggctgggccatcaaaatgaggcctctgaggctggcttcacagtccagttgtgaaatgtgcacgacccacatctcacgtgtcatttattaatgcagtatattcactgactgtgtgccaggctctgcagataatgtggcaaccaagatagactctgcccccatgctcatggatttattgtccaaagatgagacagacgcagagatgctgacatcacagctggtcaaggtgggacaggggagaggcagacagatgggtcaaggctgggatgggagaaaccccaggagctgtggaagctcagaacgggccccccacccaccctgggggaccaagggggcttcctaaaggagacacctttactgagacctgaacagtgtatggaattagttgtggggaggtgggtgaaagaagggtgctccaaaaagagggagaagcacgtacaaatgcccacaggtgacagggagtcgggagtgttctagaccagcatgatccaacagaagagtaacacgagccatacatgtgagctgcaaagctaattaaacattttctaatagcccaattaaaaaaaccataaaattaattgtaattttaataatatattttatttaactcaatatatccaaaatattaccatatcagtatgtgatcaatataaaacattttttttgtaccaagtctttaactctggtgggtatttatgcttaaaatatatctcaagtcacacgagccacatttcaagtgcccaggagccacatgtggccagtggctcctgtactgtactgaagagcagggcaacacctttgctactcaaagccttggcatcatttgggagcttgaaatgcagaatctcaggccccttcctcaacccaccgaagcggaatctacattcaaaatcccagatgcacatcagagtttgagagaaatgggtccagttctgcctaaaatacttctgtggcttcctactgccctcatgataaatgtccagctattgaggttggcaatcattcattcactccttcatttactcattcattcagcgcatggttactgagcacctactgagtgccaggccctgtgctgggtgatgttgaggactcaccgacggtacagacagacctgattctgaccctgctggaactcccagacagttaataaatgagtagccaaatcactgtttcatttggactatgtgaaacataatatgcttaatgtgaatttgcagtgtacaaggagtgtcagggaaggtctgacccgatttgagtggaaagggatccagaaaaataacccaaataagggaagaggccaccaccatggcgaaaggccacaagcagattaaatgtcctattgcagaggacaggattgccaagcaactccagcccattcatggtcattaagaaggatcgttttcaggcttcagagaaatgtggagaaacgcctggagtatagggttacagaaaatgagccagggacagagctggtgcggtgatatcaccccatgcacagacttgtctgaatttggaaaatgaggagaaaggaggggatcagagaatcaggaagatgggcaatttgtcagtagggaatgacttggggcaagaaattgcaggttatctttttttaggaaaatttaaaaatcccttaacaaaacatatctagatttgctttaaaaataactgaggccgggcacggtggctcacaactgtaatcccagcactttgggaggctgaggcaggcggatcatgaggtcaggagttcaagactagtctggccaacatagtgaaactgtctctactaaaaatacaaaaaaattagccaggtgtggtggtgtgcgcctgtaatcccagctactcaggaggcaggagaattgtgtgaacctgggaggcggaggttgcagtgagcagaaatcgtgccattgcactccagcccgggcaacagtgtgagactctgtctataaataaataaataaataaataaataaataaataaatctgagcagcagaaaaagatgtgcaaggtatggattaagcaacagtggccatatgctggtaactgcagaagctagtgatgagaacgtaggagttcatcagcctcttctctatgctcttatgtatgtttgaaattttcccttaaaataagttaaaagtgttttactttttcttcttctttttagagatagagtcttgctctgtcacccaggctggagtgcagtggcacgatcactgcctagttcactgcagcttcaacctcctgggcttaagcgatcctcctgcctcagcctcccaagtagctgggacaacaggcttgcaccaccatgcccagcaatttttttagttattgtagagaaaggggtctcactatgctgcccaggccagtcttaactcctgaccccaagcaatccttctgccctgacctcccaaagtgctgggattccaggaatgagtcatggtgcccagcattttaaaaatgtttttctttacaaataattggtgatgttgaaaggtttctagtcgctggaaaagaaagcaatttaagcccctcttccaaaggaagaaactgtaagatcagaaatatgagtttctcctttcagaatagagtcaaggaggaaggtggttaaaggcacacatgatagaactgagactcctaggttcaaatcctgttgcaggcacttactagctatggaacctgaagtaactgatttaaactctaaatgcctcactgaaaacctgggataataacagtagctacctcctaaggggtatgtgaggattactggatgtatgcaagctgggggtttagaagagtgcctggcatgaagaaggcaccatacaaatgtgggcagttactgtgaaagcctatgctagccaggcttagaactgcaaaatgtcccaaagcacatccgctaatagtctctctttcttttttttttttttttttttttgtagagacagagtcttgctgtcacccaggctggagtgctggagtgcagtggtgcgatctcggctcactacaaccttgacctcccgagttcaagcaattctcctgcctcagcctcctgagtagctgggactacaggtgcacgccaccatgcccggctaatttcttttgtattttagtagagacggggtttcaccatgttgcccaggctggtctcaaactcctgagctcaagcaatccgcctgcctcggcctcccaaagtgctaggattacaggcatgagccaccgttcccagcccactaatagtctctttactgaactcactgtgccaacagccactgatatcagagtggaagaattctcccaatgccagtattaataatctagttaacttccctcttgcacatacaaaatccttttatacaattcagttgttctaaatgcttgtgagacattttttagataccttgtaagtcatgtttataaggataattgtgataattaatatagaagattctcttaatcaatgtgactcaaaaggaagcttacaagtgatccttaaaatttcactctggtgtgacaaccctagtgtaaagagaaatgagcctcagttttcttcctactgctgtagattttttaaagtaataaagtgattcctgaaagttgttttcatcttaagctgacacataatgtgatttattttcctgtttacttttccccctacaacaggtttaattgcgttaaatggtgagatgggaggccaagagcccagggaggaggacaggcagagacaaggtgggagaggaccgggttggaccaaggcagagtggaaaatgggagaagggagaagatgtgagagatgtccagcagtcccagaggacaagccctggaagctgatgggctggacggggggcagggatgggagggaggcattcagaatgaggcccatggctccctctgagaacctggagcctggaggggccacccctgagacaaaggctgagagagcatgtttggaatctgggacatggtgagtgttaagggcccaaggattgcccagttgggattgggggattgtccatgaggcctccggatcctccaggtctagggctcagagtagaggtcagggctaaggacagagtgtgtcatctgcacagagataggaaacagaccatgaaagagggtaaggtggccccaaggtgagaagagagaacatagccccaccacatttaacagactggtgaaaacagaggagcccgcaaggaagcaaaacgtagaggaaatgtcaggggatagcagactcacagaaactaaggggagggtgtgctcacagaaggcaggcagggtcaccacagccgatttttgccaagatgaccaataagatgagcaccaaaaagagcccactgagccaggcttctcactggcagaggaaggagttataaagaaagcaagggggggatggtgagaatgaaccctctggtactagactagtgtcagagtatcagtatgaactcatgcttatttttacacaccattctccaatgaaaagaaccagtgactctagaggaagagctaattctagggctggtgcagggagaatacatgagcctggaatatcttgcagtgccagaaagtaagaaggtgttggagaaaaaaaaaagagtaaagaacacaggagccaacctgaaagataaacgctgatggccaaggctaaaacaacttgagcaaaaaaaaaattgattacaataatgttggggtatgcccaactaataaatattcatgagtccacacggaaataaactaatgattgtataaataaaataagtgaagtatgatagaagggacaaatcttccatatggaattctaaatagtaaatgtaaagaaatgagggaaacagaaagtcatcattataatatcacggtaataactgctacagaccgggtccactgatgaatgctaaaatgtgtgggtaaacttgaaggagaaatgggatatttgtgcagcctccaagtatctccctatttccctccaggaatcaggcttagctctcctctgagtgtgggctggatttagtgacttgcttctaacaaatgagtaaagggaaaatagtggtattatcgttgggaaatctgcagacaccactttcatgaagtgatcaggttaacctcacctcagtgagcattcttcccaaagcctaaaatcccagtctaaccacgagcaaaatgtcagacaacctcagactgagggccattctacaaaaacatctcaccagtactcctcagaactgtcaaggtcatgaaaaacaaggaaggactgagaaattgtcacagattggaggaggccaacgagaaatgaccaacaaatgcaacatggtatcctggattggatcctggaacagaaaaaggacattaatggaaaaacaggagaaataggattcaagtctggagtttaacagaatattaatccatgttaatttctcagttttgacaaatatacaataattatgtaagatgctaacactaggtggaagttgggtgtaggtatagggaagtccctgtatcatctttgcaacttgtctgtaaatctaaaattattaaattttaaaacgttcacaaaactttaagtctcctctgcaatatggctcgaggtggtcccccgcggagttccaaagcacgctttgtttgactcatccttcagatctcatcttacatgctccccacgccaggaagtcccacctgacaccacagactgggtcaggagctgcctctggctcccacagtccccctgtggctcccctatcctggccccaacccctctgcctccccatcccagccctggtcactgtctgccgttggggttgtcttccccactggactgtgagctttgcgagggcaaggtggaggctgtctcagccattgctgtgtctcagccattgctgtgtctctcttgagttgagagtaatgcgtgtctccctgactcctctgggaatacccatgaacaggcagaagctgcgcctgaatcctcccaactgacccttaacgcttcacagcccaaggcctgccagatccaccttcctggtatcccctttcctgtttgctcaatccaggacacatctgaggcaatataaatggtctgtctcacccatcagccaaaagagggtcaaatcatctccaacccctgccacacctgcccacccacatgtccgccctgtacaccaagtgtcagaaacacatggtgactgtgaatgtttggggggcctgcccagtccacagcccttctgagcagacagtcatcactataggaaccctccagctccagtgagttgagcagggttggatacccgaccctggaaatcccattcctatctgggaaattcggaatgaagactgaggggctgcgggtaactgagctggaagatcacatagagtgggggcaagagtccacccaggaccaacccagctgcctgagaacaggaagcagccaatgcaaagagaagcagagaccacagggcccagtggaaaggaggaatgtcacaccactgtctcacttctgcttctattctgttctcatgaagcccttgtcaggttctttccatcactacccacaaccaatcacagtgagttctgccttcaaaatgcacccagactccaatgactactcattctgcccctgccctggtacaggccactgtcatctcacctagattattgcagcaacctcctcacgggcctccctgctctcattctcagcccacacttccatctatacaccctcccttagtgatcccatcctgggctttaataccataaatatgccaactactcccagcccagatctcacccttcaatgccagtcttgtataagctcctgtttggccagtgggtccagtcagaggctaaacacgcccacactctctctcagtcttgtccatacagttaatggcactccctccttcctctgtgcagactaaacgccatagtgtggtccttgactcttctttcttaccctacatacctgattctcccttcaaattatatgcaaaatctgaccacatctccccaccgccccgttagcaccctggccaagccactatcatctcagctggactgcacagtggcctcctcactggcatcctgcttccaccctagtagccacatgggagccagaggaaccctcttaccgtggtagatcacatcgcctcagctcaccatgctctccctgccacacatctcatcagcttcaaattcaagtccttcccatggcctcccggtcccacctgaccttgccttggtctccttccctcccactgtgtccagtcaggtccagttcactcctttctgctcctccagcacaccaagcatgcctcggggcctttgaatttgctggttttttctacctggaatgtccttcttcccagaatatacatacagccagctggtgtcctccctttctgtgaggtccattaacgtttttctcaaagaggtcttctttaacccctctatctaaaatagcacctcttcccactctctagtcttccaaccctcaacttctacagctctgttcactaatattagcattcatcttgcccactggaatgcaggctccaggaggacagggctttcgggggtcttgtttgctactattaataataccagcacctaaaaatgcttggcatgtagtaaatagccagatctgatgactcaacaaataagaaaaccctggaatcagttaggatattgttgattctaagtaatagaaaactcaattcaacaatatagttggcttaaacgatagagatatgttgaattccctaatgagaaagtctagaggtaactcactccaagtgaggcctgatccagcacttcaacaacatcaccaaagactcgatgtctttccatctctctactagtccttccaagaaaatggctaaaatcacatcactaagaagtgggttggctggacgcagtggctcacgcctgtaatctcagcactttgggaggccaaggttggtggatcacttgagcccaggagttcgagagcactctaggaaacatggtgaaaccccatctctacaaaaaatacaaaaattagccaggtgtggtggtgcatgcttgtggtcccaagtactcaggagactgaggcaggaggatcacctgagcccaagaggtctaggctgcagtgactccagccagggtgacagagtcaggccctgtttaaaaacaaaaaaaaagaagaagaagaagaagaaaaagaagtggaagtgggttactaatgtgtttattcatctgaccgccacttcttcaacaattgtgaaaattgtaatgctgatgaacatgatgctgataataatagctatcacatattcagtgctttgtgccaggcgctttactagtactttattagcttctgtgtgccttcatttcctcgtttgtaaaatgggaacagtagtagtaccacatacggtgactgaggattaaatgagctaatacataaaatggtaagatcttaaaaaaatattagcttgtttcagttagctattgctgtgtaacaaagcatcctaagccacaggggcataaaatagcaaccatttctttgctcatgattctgcaatttggacaaggctcaaagggtcaggggatttgagatggttcattcctactccacatggtgtcaactggaatgggagttaggccatcccaagatggcatcacttgcacgcctgcacatcagctaaaagttggaacagccgcgggctggggcagatctatagaaagggcagggctccaagagtagaagcagaatctgccaggtctcttaaagcctaggcctccatttagtacagcatcatcttcattgtatttttttttttttttttttgagaaagagtctcactctgtcacccaggctggagtgcagtggtatgatcttggttcactgcaacctccacctcccgggttcaagtgattctcctgcctcagcctccagagtaggtgggactacaggagtgcaccacacctggctatttttttttttttttttgtatttttagtagagatagggtttctccatgttggtcaggctggtctcgaactcctttcctcaagtgattcacctgcctcagcctcccaaagtgctgggattacaggcatgagccaccgcacccagcctgctttcattgtattctattggtcaaaacaaatctcagggccagctcagatataaggagaaggaaggagactccacctcttgataggaaaaacagcaaagaatgtgtggctgtcttcaatcacagctattttaattccacagtaacagccttgtcactggtctccctactttaatccttaatgccttatagtcaattccccacacagaagccagaggagtcttttaaagtacactttagtgtgaagaattttagaaggaaacacacacacacacatacacacacacacaaacacctgaccacgctcctgtccccagcttaaaattctacaacttcccactacatgtggggtaaacacccaaactccttatggcatacacaaggtctgacctcttgctctgcatcagcctctaggctccaaccatcccaaactcttatctcttaaaggagttaatgcctactccttcatcacctcaaacctcatttcctaggatccggatttgatttcctatcaagtattcttataacactctctacctttcttggtaatttcacacgtgtgattatttgatagtctaaattactgtccctattactgtaggttctataggggtaggggaatattttgttctcttctgtgttcccaatgctgaggagaaagaagaggcaaggtgaaatacttgttgaatatcttgagccctcagaaaactttaaggcagctccttggagttctgtagaaaggggatcggcagagtccccgccatgctgggatccagatatgtgctcttcaatagtttatttgataagtagttactgagccctaactgtgtgccaagcacttttctatgtgttggagataacggaggaagtagacaaaagccccttccctgatgaagtcaacagtctcctagaggtaagggtcaggggagacagaccataaacacagataaattctacagagtgttaaacagtaatatgattaatgctaaggataaagttaaagaagcaaagatagatgtgactataagtcacaaatttagaagggtggtgagggaagatctcaggaaggcagtgacatctcaggagagacctaaagaggaaggaacaagtctgggctatttgatagatgagttctttaggcaaagaaaagagcaagcacaaaggccctcgggccagtgtggctggagcacagggagtaagaagagtagatgatgtcagagaggtgatgagggcagacaatgcagggccttgcagaggactctgggttttaccccgagcaagatgtagccttggaagtgttctgagcgggggagggatatgacctgatacaggtgctcacagcatccctccagctgcatgtaaggaacactctgggggcaggggtgagagcagagagatcactgaggagcctgccataatggtctgtgaaggagataagggtggacaggagtgaaggtggggagaagtggtcaggtatattagctgacagacatgaatataagacagaaagaggagtaaaggacaattccagtggtttgggcctggagaggatggggggagcatttactgagatgaacatgcagggaaaaaattttggggaaaggagcaggagctcaatttgatcaaaattactctggagatacctctagattaccaacaggttatgaggaaggcagccagtcaggagctcaggggagagattctgggatggacatagaaatgtgacacataatgggaggccgaggcaggcagatcacaaggtcaagagatcaagaccatcctggccaacatggtgaaatccagtctccactaaaaatacaaaaattagctgggcatggtggcgtgtgcctgtagtcccagctactcgggaggctgaggcaggagaattgcttgaacccgggaggcggaggttgcagtgagccgagatcacgccactgcactacagcctggagacagagtgagactccgtctaaaaaaaaaaaaaaaaaaaaaaagtgacatatacatttccatgcctctcccaaattcctcacaagacctacgtgatctggccctgctgatgtctccttggtaagttaatggtacgcgcgcacacacacacacacacacacacacacacacacacacacatcctgggccctccccttcctaggtattgataatggtcaagttacctaaacttttctgtcctaggtatcatttacaaatgggagatcacatcagcacctgcctcctaggattgttcattcaagacattagccactgagcatctgctctacgcgctggagatatcccttctccactcctctccgcctccccctcccacacagcctgtcaaccttctggacgtctctcccatcccctcttgccctccctacggtggcccctgccctgatccattcccaacacctcttgcctaggaatctgtcacatctgccaccctgggtttcctgaccccagtcactttcccgttaatctattctcatgtcacagcaaactgggccgtaccccttccctactaaaaatcctcccatggctcttcattgctctcaggacaaaatccaaggtccctaaatgatcaagaaaatcttccacatctcattcatacagaattttcagtatgatcaccaacaccagatcgcctgcagtccatgttcacacaacaggctgtttctctctgcctttgcgcaaaccattccaccacaccgcccccgacccccaaaacatccttccgtcttcaggtctcagctcagacagctcctagtcttccgggatgatcttcctaccaaggtctcctcgggttcccaccgcgttccatgccgcctccattagtgaacatacataggtccgcaacggggtcttgcctgtctctcccactgagcggggcttcccgcaagccgggccaggcacagcggccagtgatgtccgcgtgctggggcctcttcaggcctcggcgtctactgcccgctctggaactgtgagcgacaaccggcactctctcccgggacggcgccgcacccaccttctgcacacctcggagacctcaacacctgcgccaaagccacccagtcacagccttctctccctctcctaaacaccatgaacatccaggccccgggacctcagactgctcattggctgcctgaaaacccgcccccaagcctgagagaaaagaactctggttgctgtagttccccaacgaacaccgcagaaagcgattgctaagtagaacttcatttcccacaaagcgccgagccccagtggtggcagacggtaccctttgaactgggctcttgattggccggttgggagacgtacatttccaaattaccgtggaaacaggaccacttacctggaaccccgggaaaatctttttgtctcagaatctcaaaactctttgtttcgcgatgattccaaagagctggacagtacacgtggggacagagtctgtacctattgtctgcctgttccccagatggcaccaacaaagcctcctaagtgtactcagctgctactggacgcctgcttggcatgaggagccactcttgtgctaagtctgcggacgccccggcttattagggcacctgtttcccagagacaggccagagctgaacctttaccctttcagggtctatttacccaggaaaaggcaaatgtaggccaggatcctgtccacgatctatctagaatgctgatgccccagacctgcagactcatgcctgcaacacgcgccacagcttccccacgagacgtctccacaccagagctcctccagcaccccctccgcaaacccccttccccaccatgcctctgagggtcgggtgaggggagccgaggccctgcaaacgctcaggcaggcatgtgagaaagctctttactgggggtacagcgaggaggagcaaggccatctccccctacctgcccccaccccctcctagggtcctggggtgagggggggtcttccctccaccggaccaccactgtctttggtacaataaatagaaaaaaagggggagaggggcccaagggtccagtccttagtggggagggagcggccaaaaccctctccttgacccccctgccccaggccccaatcagtgcaggcctcacccaccccagctgggtagcagcaattccagtcaaggagagagatgaggatgggagcccagggcccccagatgggggagggtatggcttcaggaggggccccagggagggggcagggtcacgagctggctgctgtgctctggggtacaccacggaggcccaggtgaggccccagagtggcagggtcatcaggaggcgggaggggtggacgacctccagtcatccgagtccggagggctgaggcagccgggtgctggggggcaggcgctgggtgaggtggggagcagtcagcagggccgcccaccaggctcacatccatcagctccgggggtggtggtgaggttggtgatgggggacgaccaaggtatcggggctgggggggtaactgggccccggtcccaggcagtgacgaggcagaggcaggggcttgatgtgtcttgtggggcacatcaccccctgcccagggccgcagcggctgggagggtgggacctaaaaaagcaaaggagccatgggtgatggagaccctggtctctaagccccaggcaccaccacccacctccaaagcccccaaagccccattacctgggggctgttcatctcacagtctgtgatagggggcccagggcccccacaatatcggttgctgtagcggtaggtccggttgtcactggaggagccactggagcctcctggaagtgccagggaggagaggtgaaggggcataaggtgagagaaggtggcgagtgggttttgggatggctgagggaaggtcacggcccaggctcaggttcaggcttcaagagcagagcccatctgaagcaccgggcccaattctgagattctgggttggaattcagttttgggttttagagtcagaaccagtttcagggctctgagcccaatttcagtgattgtgtcagggccagttggagctctcccatcccacacgtcatcttacagttcaggatcagtttcggcgctttgtgtgaagacccagtaaccaggtcccccaggacaggccaaacctgagcagcccccacccgttgtaccccatttgggcacctgggcacccaccagaactggagatggagctggcggtgctggaagaggggcaggtgtcgaggggcgcgggcgaggtggaggcactgctgcctgccgggcccgtgttggtggcctcgtcggccgtgcggcggaagaagccgtgctgcagagcccccagggggctgatgcgggcggcgggctcatactccagcatgcgcagcaccaggtcctggaagcggaggtagtcggcggggctgtggcccggctcccccgcccgccggcccccgggcccgcccgtctgcacgcccagcacctcctgcagccgccgtgtcccggggccctggtaatcctggcagggagggggtgggagggggggcaagagagtggccgtcagtgggcaggaggggcagggagacacacacggggaaacagaggcacaagagagaaagtggaaagaaaagctaagaagagttgtggggtgggaaggagagatgggagatggggtgggcaggggaggaaggaaaggacagacaagggggagtggaaggaagggaaagacacaagggagagggagcagggggagagagccccaagtgtgagtgaggggccacggggtgggaggagtggcatggggcaggggccgcaccttcctgagttctttcgtccttcgtagggtccagccacccccaggcagccgttcaaagtacttgcgagccttgggcgcctggtccagcatggcggccggtgggatgcccagcacctccacaatgcggttcatctggtcgacctgtgagcaggcaggggtcaaggtcatcaggccagccaggctccaccccctccacctccagcacaccccttcctgggggcacacctcattggagccactgaagaggggctctccggtgtgcatctccacaaggatgcagcccagggaccacatgtcaatggccaggtcgtagggtgtgcccaggagcacctcaggtgagcggtagaagcggctctggatatactggtagatctgggaaaagggtaatcgtcaagggacccagcctcccctactggtcccactgacacccccaaagctaagaggacccaactgaggacaggcttcttgctgacaaaatggggactgaggctccaaatcctgccattatcagcaccaattttctgggagccactggtgccatcttgtttatcaatctggggagtctgctggcctagacagaccctgatctccacccccaacccggatcctgggcccttctgggtcaccaggcagaggctgacattccataagccctataccatcgtcacttttagtggcagctcatacagagctgcaaagttgaagccttccacctccatcctcagctttaagaacagagaagacaaaaacttagcgaggcagcacccctggctcaaacccaacccaacttcaccctgttcacatctggcagcttcaaaatgggccctgcccctcaggcttcacccttcccatcctagtgggcagtatattcacacccccaccccaagcattatccctcagttcccacggctcctaataatcccatcccagccaagccccgcccctaagcctcccgttggctctgccccacccaaactactagccgtgctcccaggaccgggccgccccctaccctctggccaagctggcaggagctgccgaagtccacaatcttgatggcgctgcgcttggggttgcacagcaagatgttttcgggcttgaggtcgcagtgaatgatgctgagctcaggcgtggccagaaagagcagtgccgtgcagagctgctgcgccagcttccgggtcaggttcagcgagacgccgcggaagtgggtgttgcgcaggaggtcgtacaggttgtaggacagcagctcaaataccaggcacaggtggttccggaacatgaagtgccgcttcaggtgtactgcgggggaggggaggaaatgggccagagaagaaacggctcagagagggcaggtggtggcctggggtcatacaacgctctttgattactagccacattgtgctgtccccacgggtaccatctgctagtcaaaatctttttatctaacaactagattcacacaggaagttaatgctctttccaagtctctgtcaaaccctccaattaaaccaaagagaaagtttcattagttactactagctctaacacattctacacttcctcatttaatttcataacactgctttcatctcccttgtattcatttttgtggcaaaggacactggttttccgtttactttaaggatatacgttttcctttcaaacgaaaccattttaaaatccacttgctgtttatgattatgttgtgatgtttatgtccatgagcaggaatcagtttaagggaggagaaagactggcacagatgttaagagtaacagctctggagtccacgacctcatcaaattatagctcaattagtacaaactgccacctcatgcaagtgacagcacttgaatgcctgagtttcttttttcctttcttcgtttttttttgttgttgttgtaactgttgttgttgttattaggtttggttttttgtttgttttgggtttttttttttttgagatggagtctcgctctgtcatcaggctggagtgcagtggcgtggtcccagctcactgtaacctccgcctcccaggttcaagcgattctcctgcctcagcctcctgagtagctgggactacaggcgcgcaccaccacatcaagctaattttttcacatttttagtagagacggggtttcaccatgttggccaggatggtctcgatctcttgatatcatgatccgcccacctcggcctccaaaagtgctgggattacaggcgtgagccactgtgcccagcccgttttgtttgttttattgaagaagaaactaggatggaagcccaggtttcttatcttcaagatgttgttaataatgcccttccccttatgggctgtggtgagttaacttccaagtgcttccaagagagcctggcccttggtgagcactcagtaacctctgaccattaccaagaaaataggacaaaaatcataaaagcagcaggagaatcactgatgtcagagaagcacagaccaaaccctgctctgaagacatcagcctcctcctgagagtagggcgggggtgtgacccatccctactggctccagctcccgctatcccaggtgcccacagccctgccagtcccaggcctcacctatatagtacttcatctccgtgtcatgctggttcatcagctccagcagccgcagctcaatctgggcctggttcaggaaagcctttttgttcttgatgatcttgatggccacaagctcctgggtctgatgatcataggctttcaccacctgttggggcagggcatgtcacgaagaaaggggtgggagcagggcagagccaggcaccattcttctccctccaggcaaggagacccaccaagaacactatgcatacttcgcagctgagtgcgcaccattagtcaggcgctggtgtaaacactggatgtgaaataacataacgaccttatgttgagtcttgttatttaaactgttttacagaaaaggcgactgaggcacagggaaactaagtgggctagggtgagtggcccagcatgggacttgaagccactgaaccactgggtgtgtgatcaatgttagtggggccttggatcagggtggtggggggtgtcccacacctggccaaaggagcctttgccaatgagcgagtcaatttcgtagcgctccagccagcgctcgccactgcgcacgatgtagtcatggttgtcgtcatcataaccatggttcaggaccttcttctccttcttgttgctcgaatcctggggtggcgcctgctgggcccgccgcttcttcttcgcatagtatacctgcccagccagccagccaggagatggggactggtgagtgactcatgccagcagacaagaccctcggcacccagcccaggatcccccagcccctgcccacctcattgatgtgcttgtaggtcttgatgaggtccacagagagcttacgcagcggggctgaggttgcatcccggaaggccaggggcagcctccgaggcagtagccgcacatcaggcaatacctgcagggcagggtgaggggtgggcactgaggacgtgccttcacctccgacctcaagaggaagaactgtaagggctgctggcacatcatgtatttggttgctgtctgtatttgttccacctgtctaggaaagaaactcccccagggctgagactttctcttgttcttactatacctccagtgcctacagcagggcctggcacacaatggatgctcttagagatctgtggtgtgaatgagtgaactctgacctttcacccctcacctttactcctttctgaacctcagagggagagatcatatggaaaacctgggctctgttcctccccattcttcactttgaagccagccattttgggtaccctctgaagtacctctatctcaatttaccctcatcccttgggcctcaacccatactcccaccaactctttgcacagttctttcaccccaaggctcttggatctggatctggcccctggacctcccacttcatcctgcttcaagctctgcatgtcactgccttcactgcctctagccttgggagagctttgccctcaccacccatgcctgttggcctcaagaccctttagactcaacccccctccaaattcacccaatccagatctttcactctgaacttttcttagtagcatttattgggtatttactatgtgccaggcaccattctaagtgttttacatgcataccattaactcatttaatcctcacaacaaccctgtgaagtaggtatcattattggccccatttcacagaatgagttgagttctccaactcaagtatggagaacctaaggaatttaaccactgggtcaggatttgaacccagcctctccaaaccctgactctgcctgaaaactcctctgttattttccaatcccatgggacccattatgtgcccagaagaatgtcttgggcaaccacactaccttttggtctggagacctttctatccccagcctccccctaccaccacgcaggtgaggagccagctgaacgcgtacctgcgtgtgctcctggggccctgggaagccagagaagggaccatggcccggtgggacggccatggtgggctcagagggccgcaggggagcgaggcctggagcgggagcccggccggggggcgccttcttgcatcctgcacctcggctgccaccgccgctgagacctgagagcagacaggaagtgggaaaacaacatggaacaaggggatatgtgaatagtgccaggcggggaagagtggacatgagaaagacagggcacagagagaagaggaaaagggcacaacggagcagcagatagcaatgaagagaaggggcagagaagtggtagccaggtggggggggatggcacagcagtccctcgacaaataatgatcaagtaaatgattaaggcagcacaaagagaacacataaaagacaatgattgggggccaagcaggggtcgatatgagccatcacagggaaaggaggacaggaagacaccaataattcagaggaggaaaagaaaaaagaaaccacagacagtatgcagaggagtaggcttcattcttttctcactactcgtggccctccccagggcccctaacacaagatgccactttctgtagtcttccctgaacatcaggatctcagcccgtagcacagccagggccaatactttaagatctatccttctcagtagattccctcaacccagagaactctaggattcccaaaccacatgagtcttcccctcccaaaccacagcagagtcctctgcagccctaaaaccacatcagcgtccttggggacctcccaaccacaccaaagttatctgagaacctctatagaacagagtcctatctctacagcattctcatccaccagggcacgattttcctaggggaccctctccatatcatgccaagaccgcttccctatttcaggtcctccatattaggaaccagccttccaggtagtctccctgtaccatatcccaattccccctaccacaacagggttcttccccatattactccaatatcccatcccaatcaaggcccactcctcctgatgggagaaggaggaggtgtctcttcccacagtttagagtgatcatccttttctcccctacactgcttccttgcccccctacacacacacacacaccctaatattcctaccacagacctttctccaggcacccctctttataccagggtcattccacaactgtgtccactcctagagggcctcaaagtcaaatccccaagttatcacatagggttctctcctcccagagttgtcagctacagcaaaaatcttctccccatgggccactctctcccccatgtcaaatccctttctcctattccatgccttgccactccacgactcctccacccttggagcttcccccaaaaaaccacctcttctccggggccctcccacaccaggatcatctctcccagcccccaccccctacccgggtcagggctggcgcggggcccacggggggctggggcgcggtggggcccccagtggggtgggcgagcggccagcatggcggcggtggcggcgctgaaaaggcgaccgcctgtctctggcccggccggccccgcggcggggagggcaagcgggacaggaggcccggtgggtgacaacagcagccgccactgccaccgggggcggggagaggaggggacaagggtcagcccagggcacgcgggggaagagtagagcaggtggacgggggaggggcgacacgccccaccctgagtgaccaccagcccctagggacccggcgtcccgccccccacccaggaggccctcctgggcctgctgagaccggaaggcggggcccgactgagcttggcaatcggcacctgccatggcaacaactgtaccattggtcgctggtgccaagagctcagccaatcacagcctagggcagctgttgctaggcgacgaagaagcggcccgcggagctgagcccaaacaaagggcgggagtggggcccggctaccccctcccagcctccctcctgcaactgcttcctcgggcttggccggttccaggaattcaactatgaatagccaggcagggcccgcacctgcctgccacccccctcctctcctcccttggcctcgtgctaagtctcacggcgacgggagcagggcggatcccgtcctgcccacctccctgcgaccgcttgccgccccacccgtccccgcgccgttacctgaaggagcgggcaaggggactcaaactgctcggggagcccgagctcagacctgcccactggctgagggtatccggcggacgcggcaagccagggccccgattacccagtaatgcaaccagcaaaatggcgaccacaacaaaccggcccccccacgccctggactccgcccccatccctccctctccgctcccctcacgtgacccacactgacactccgcctgcgcgagatggccgcttacctgcacgcatgcgcagcgagctaccaatcccacccaagaaccgaaatccaggctgccgctgcgcaaaggcagctagaaacggagcatgcgctctgtgaccgagtgagaatttacccaaccccgcaaaattgaccaagggtgcgtgctccctgtgtcagcaggtcaaggggaggaatgagcagcagacatgggagacggatgagtcttttaatagaaaaacacacgtgcaacagtatcaacacacatctctcgcaatcctgacagcgctgaacttcagttcttcaccttggggggtggcctgtgagaggaagataggtgatgaaggagggtccccaggatcatggcactcggggtgcaagggacagagatgtctgtcttggtgtattgctgggcccctgctcacctgtacactcccacgaccacggcatggtctctttcatatggctcaagggtcaactgctcctgcggcttcatgttctcctgttgcatctttttcacttcggaggcaaacacggcctcggctgaggctgtggagtcaatgcagttggcctaaagaggagaaaggactaatgtctacaacagggctttgggctgtttttctcttgtgtgctctttaaaccagatgttttcattattaattcaagtaaaactcagtgctatggttctagtgtgtcccccaaagttcatgtgttggaaacgtaacccttaaatgcaagagttgagaggtgggaccttcgagagatgattcaggtcatgaggcctctgccttcctgaatagagtaatgctattatcacaagagtgggttgctgattaaaaggatgattatgccccctttctatcttgctctcacccttctgccaatggatgacagcaagaaggccctcgccagattcagacctccaatcttggactttccagcctttggaactgggagccaaataaatttccattcattataaattacccagtctaaggctgggcgtggtggctcacgcctgtaatcccagcactttgggaggccgaggtggctcaatcacgaaatcaggagattgagaccatcctggccaacacggtgaaaccctatctctactaaaaatacaaaaattagtcgggtgtggtggcgcacacctgtagtcccacctactcgggaagctgacgcaggagaatcgcttgaacccaggaactggaggttgcagtgagccgagatcgtaccactgcactccaacctggtgacagagtaagactccatctcaaaaaaataaaaataaaaataaaaataaataaattacccagtctatagcattctgtgatagctgcataaaatgggctaagacactcgggtttaggaaatgtgataaaaggcttaatgaaagtttttggctgggtgcagtggctcgtgcctgtaatcctagcactttgggagcctgagacaggcagattgcctgagctcaggagctccagagcagcctgagcaacatggcaaaaccccgtctccactaaaaatataaaagttagccaggtgtggtggcacacgcctgtagtcccagctacttaggaggctgaggcagaagaattgcttgaacctgggaggcagaggttgcagtgagctgagattgcaccacttcacgccagccttggtgacagagcgagactctgtctcaaattaaaaaaaaaaaaagtttttagttttgttttggatttgaagcaggaagccttaaacagtcctatttatctaaaagccagtgcttaaattttatacccaggaattgtttggcttatttctacttcctcttctttaataatagtaataatgcagttgagaataataaaacaaatgtagcaaaaggctaacaaatggtgaaccttgtgaagggtgcatgggagagttctccattatttccaaataaaaatgctgtgaaagatgcacctagcttttatctagtatctattctatgccaggatcttttctaaacacttcatattatattgactaatttgatcctgtcatctaccctgaaaaagactagacaatatttctatttcataagtgaggaaactgaggcatataggttaagtaacttgctcagtcacacagcaggctgggattaaactcagatggtcagactcaattttgcacttgaccgctgcactctcctgcctctttaaatccaaagctatagttttgcagacttggcccctctgttttgggtggctatttgacagatacagatagagaagatacctccctagaacactgccaccccatcttagactcttccaaaccccgcaccttaatggaaatcacaaagtgtcctccattacgcaggaaggtgtgggcattcagggccacaatccgggtctggtctggctgggccacatcagcaaagatcacatccaccattgctaaggagaaaggagcagcagttaaaagttggagtcacagggatcaccccagatcctcccatggggcctatgcccatcaccagcaggttcctgggagattctccctgcctccagtttcactccccacctccactggtccccctccctccagtgtcccaagatgagtccaaaacccacagtcacatcattcatccactcttcttgtaaaccatggttgccacctactctgtggccagccctgggccgggcgtgggggacatagagacgagtcagacccggaccctgccctcgagacgctcccaggtctggtggggagacagacacgtcatcaaaaagacaagtaagagtgagtgagcacttataggcaagagtgtccgcaggactgtgaaatgaaaacaagttgcagaacaaaggggatggtatgagtgcatgggaaaaataaaacacagaaagaaaaaggagcagaatgaaaaataatgtttttaagccagtgtgacttttcaaaaaatgaaaaggtggtataatgaaaactgattatttaaaacctgggaaaagcagacatcaaattgttctcatcagttacttctggcggtggtttataaggcttttcaacttttatattatatctttgaatgtttttttaaacaaagtaattaatattcacagtgggcccctccagatcaagccatgcttagttttctgggatatgctctcaccagacaatgattaggacccccaaaaggaggctttttatggaggggtagtgtaataaatacaagaggcaggaagtacaggagacctaggagatggggaggagactgaaggagaagaggttggccctccaagggtggcttccaagactctgaagccaagctgccacctccacaacctcacctagctccccttacccctttctattcctgcagactcaagaggtctgctcatccactccaactccatccgaatcagagatccactggcttcttccagaagcctgcggtggcctgtcctaccccaccggggccacccccagacccctcaccgatgagcatgcggtatttgtgtgggtgtcgagcatcctcgatcacaggaatgatgttggtcctcttcttggccaagttaatgaggtcacggccagagcggtgggagaactcgactgcatagactagaccatcctaaaataaattaaaaattaatgaacagtgatgctagttctcatgcatggagtgcctactttaggcccatacactatacacagcatctcttccaacccccaaatcaaaaccctaccatctaatgactattgctatcatgtccatttttcacatgaataaactgaggtccagacataaagtcactggccaagagttattcagcaagtagcaaaagtacccaatcccatctgcctgagagcccaggttcccaacagaggcttaaaaccaggaagccaaggcacagagatgatgtaacaatgggccaaccactgctctaagcacctttcagaaattaactcatttaatcttcacaagtctatgttccagacaggtaaactgaggcttggatgggttaggtaacttgcctgattaaagcctgaggttttttttttttttttttttgagtctcactctgttgcccaggatggagtgcagttgtgcgatctcagcttagtgcaacgtccgcctcctgggttcaagcaattctcctgtctcagcctcccaagtaggtgggactacaggcacacgtcaccacacccagctaatttttgtatttttagtagagatggggttttaccatattggtcaggctggtctcgaactcctgacctcaggtgatccacctgcctcggcctccgaaagtgttgagattaaaggcatgagccacctcgtctggccaaagcctgaggttttaaggcactacacttaacagcttataaacacataaagtaacaaagggtaacagagtgggacacgtgggtgccaggggccctctaaatgggaagcctatacaggctcagaaaccatgaagatctcctggttctttctaaagaaaccagaagagcaggttttagcagcataaaattttaaagaggcccatcaaatcaaatagtctggtatctatactccccgttgtctctctaaggttggtcaccccacacccacgtctcttcccttgaggccaagaacccaggagtgaggttgaatgacattatctggttcaagccactccttttactcacaggcacagtgacagaaaagggcctggccctaagtcacacagcgcaggcaagcagtcaaaccctgatattccaggttggcagaagggaggcagcctttacctcctgcctgactctccatctactcactcaccggaccaacgatgtcagagacatgggagaccgtggtgcccgaggcagccccgaggtagagaaccttagcccccggtttgatgtggatctggtccacaccacccaggattgctgctgctagcttggagcggaaggggttccaggctcggtactcaattttgtcatctccttcctagatgagagatggggacagaagtcagtgctaggctcttctgcaggacctcactgcctttaaccctaggagccttgaaaggaactgggctgtcctatcactgcacaagaactcaacatgagtaaagagcagtgaccatgcacatgcagtcgctgccctctcatggaggtgactgacccaaagggcagcaaaagagaataaacacaaacagtaacagtaaaaccagcacttgttcaacaaacatgcactgtgccagcacctactgtgtgccagaccctgctctaggcgctggggatacaaaacaaggatccctgcccagaaggtgtaagtattcaccgaactaactaaatacaacatggcatatgagatggtgacaggtgttaaggagagaagacaaagccaggagagaagatacggagtttgggaagcagggcaaggagcaggtgaaaatgggaaaaggggccagggaggggctgaaaggcagattccaaatcagacctgaaggaggcaaggggccattcaagttatctgaggaaggacattcccacgagagggagagcgattaggaaggccccaaggcaggcacaccctggcctcaaagaaaatgacacaggataacaggacaggggagggcggtgagggatgccttgacccgcagagtggtgtgacgcagcctggagaagcagatgataaggacgcagcctcccacagagctgggagtgggaacagcaaggccagggtggctggaggacacttggtcagagagttagtgaaggagacaaagccagggggcagggagggggaactggaatgcacagggtcttggaggcctgagtgaagactcaggagtctaactggaaggccgtggggagtcacagaaggcggatgagggagcagacagtgtggtttacatattatgacaatcctccagctgtcacgtgcaggacacatggtgagggcagacacagactactggctacaccctcagctgcgaccctggtggcttggacaggggcccagttctcaccgaaatcgagactctcttctctccataaactgattccccagggaccaggttcttggtgaccagtgcatcttcctttcctcgacaaatgaagacacctgggtgaggggatcagagcaggggtgaggacccccagcctctccctgccccgaagctcagccggctccctgccttcctcactcaccctcatgccgatgcggctccaccatcacattcttccccgactggtttcctctttttcctccccgaccacgaccccggttgccaccagaatggaagcctccacctataaaggagaggtacaacaggagagaaagatcctgaatctccgccctccccactccccacctcaggaaggcctcctctgtaacccctagccaatcttaccacctcttcctcctcctccaccgccgccgccgcctccacctcctcctcgtccacgacctctaaagcctccgcctcgacctcggcccccgccaaagccccctcggcctccacgaccaccacggtcaccaaagccccctcggccgccaaagccacccccacggggactgaatcctgtgggggaaacaaaacaggagtcagggcaatgaagcttaaaaggttaaaccaccttgtacccagcaatacctctcaggtgagaaacctgaaatacatgtgcccgtgtacagcaggacacatttccaagaatgtccacagcaaaagaaaagtgaagactaacccaaatgtccatcaatagaatgggcaaataaaatagaagacattcacaatcaagatcatgaaaatgaccttcagttatacacaacagactaataaatgttaaaatcataataattttttttgcttagtgctttttttttgagacagggtcttgctgtgccgcccaggttggagagcaatggcacaatcacagctcaccgcagcctcgaactcctgggctcaagcaattctcctgcctcggtctctgaagtagctagattacaggtgtgtgccactactcccatagtgtagagatgggggtctcactatgttgcccaggctagtctccagctcctggctcaagtgatcctcctgccttggcctcctgaagtgctgggattacaggtgtcaggcaccacacccagccacaatcatactgcccaagaaaaggagcaagggaatgagaaatgtaaaactcatgatattggtgaatgggaaggagatattaatatggggttgggataggggaggagtacatgaatagatgtaggttactgttaatatcctggtttccttggttgcatagcagattcacagaattcattccatgtcaatattaattactgtgaagagtgagccctgcatacgagcacatgctgtgacaacagggccccctagactctgcaaacgtcttcatactctcccactcctgaccttggagctggaagaaaagtgtcaaccccagccccaaaacagaggggaatacaggatgatgtcagccctaactcatctccctgcttccaagcttaaagaagtccctctcagctcaggggaaaaacaagaaaaagcagaacaaactgtcatttaaggataggctgcactttacaagtagtttgcgacttgtcagtaagatcgaaatgtttaagaaataacagactcagacaggctttattcttaccagttcaggacaacaaacaccattagcacaaaacaacgtttaaaacagaactctggtgctaacagattcaatattttctctgatttggtttcaaaaactcagaagtactaaatcacacaagttaaaaaaaatagttggaaaactagtggtttaaaattatctcacattctcacatgatgtaatctattcaatcataagcttgcttttttttttttttgagacggagtctcactctgtcacccaggctggagtgcagtgacacgatctcggctcactgcaagctccacctcccaggttcacgcctttctcctgcctcagcctccccagtagctgggactacaggcgcccaccaccatgcccggctaatttttttgtatttttagtagagaaggggtttcaccgtgttagccaggatggtctcaatctcctgacctcttgatccgcccgcctcagcctcccaaagtgctgggattacaggcgtgagccagcgcgcccagccttgctcatgttttttgtaaagatacattatgatcttgtcctacgaacccttcatgcaccttaatggtattaaagataaaaaatgtgtcttttaacagccattcctaatttaatctttaaaaatgaacggtttcattttcaaaactcccaaacaaccaaaagttgtttacttttaatcttctactccctctacagtccacttttcacacagcagctaatacatgctatttttaaaacagcaagtaagatctcatcatgcccttgcccaaatccctccaatggttttccaccacatccaaaatgaaataaaaagtcctttccctggcttacaaagcctgaaatcaaagcctaaaatctttaggctttaaattctgatttcattgttctgggcgcaaggtcttcccctaaagctctccaggtgactccaaggtgcagcccacattgagtatcatcatcctaaggatctggcctgtgctgacttccctgacttcattctctttatgctgggccccatgctcttccccaccaagcatacacagtccagcttctaaatctttaccacgtgctgttcccactgcctggctcctgcagacatgtgcatggctcactcgctccttcactgcattctggtctctgataaaatgttagttccccagaagggcctactttggccacagtacccttaccctgctttatttcccttcaaatcaattatcacacatggcatttttaatattattaccacctgcctcccccactaagatcaagctccaaatgggcagggatttttaactgttttggtcaccaccgcatccccaaaaccctgcacaacatctggcacaaagtatgggctcaataaatgttaaatgagcactgagctgatgactcttaaaccctgggccctgcctcaaggagaaagcaccctctatttgttcagaaagcacacaatccatcagatggtgaccagggaagtgccggtcactcccctcaagtatcgcatatggagagataggcaatgttgctgccactctcgaccctagtaaggaaggttcataggggtcttgaaaacttcatctgtaagacatggagacaatacagtgccaggccacgcgccatagctcatgcctgtaatcccagcactttgggagacccaggcaggcggacagtttgaggccaggagttcaagaccagcctggccaacatagtgaaaccctgtctctactaaaaatacaaaaaattagctgggcgtggtggcgcatgcctgtaatcccagctactcaaaaggctgaggcacaagcatcaattgaacacaggcggaggttgcagtgagctgagatggtgccactgcactccagcctgggtgacagagagagattctgtatcaaaaaaataaaaataaaaaaaatgcagtgctcatcctatagggttgtaaagattaaatgacttgtacccacagagcacatcacatatatactatctggcacctactttgaacatcatcattcaaactcaggggtacgcgtctcctcttccctcctcatgtaccaaaagtacccattcctcagaaaaaacacatgttcacacaaacttttccagttagttcttttttcatctttctattaaagatgaaaatgtaacttttaatagctactcctaatttgatcttttaaaatgaagtttccttttcaaaactctagaacataactaagagttgttcactttttaatgttctactccccctacagtccactttccacacagcaactaataagtgctgtttttgaaacagcaactcagatctcaattttcttgcccaagccctccaacagttttccaaagccaagaccttcatttaggggagatgccacagctaggcttatgaaagtctcaacccaggcctaacagaaaggaagtactggcatgtgcttggggcggagtgggcatgagtgtaaactttcaatcccagatactcaaaacatctcaatccgtttcaggtcctggagcttttgggggaaaatgtaccaaaagtacccagtcctcagaaaaaacacatgttcacacaaacttttccagtaagttctttttttggggggaggggggtccataaaccccctgatttaaaatctgctctccttccacagccttctccatctcaaaaatggcaattccatccttccagttacacacccccaaacccttggttatccttgactccgatcacacacccacatacaatctgttggttctgtcttcaaaagcatgtaaaactgtcagcatgtccactgctcccatcctggtccaccacaccatctcctagattacagcaacaagcttcccaccaatgtgcctgcttccacttttgccaccctgaggtctttcacacatcgaagcaaaaagaatcccttttaaaaatgtcagactgcaccacgcccctgctcaaaaatctcccaaagggttcttttctcactcaggctaaaatccttactaaagagctaacacctgacaacttttacaacttcacattctaccacacatggaggaaggttggaagaacgggtatcctccatttatgagggaatcacagaccagaatgcctgcaggcaagccaggatctcagcatacctggcctacaatcccccaccccacttcatcaagagatccccaaacacggaagagaaagggaacttgggagaagggcacagatccacaaatctcctgccaggtgacccccatctctccacacaaacacacacacaaaagaaaaagaaagcctgtactaggaaaacagaccctttgggccatggtggaaattctccaaactcaatgaagcaagttctcacacagatgagtgcgggttgggcaggccagatggaggaagtgctcaggcaccaccgagaaggattctaatgttgttctctttgagaaagataaaggtaacaattagagctaatactattatatgtcaagcactgtgctattttttttaacgtcgcttaatcctaactggcgccattttattgatgagaaaacagaggctcagagaggtaaagccacttgcccaagttcacacagcaggctaagaagctgagcaagagctgacacactgaactgaggcccttctgctgtcaaagccaggaccccctcatcattccaccatgaagggagtggtttcagcagaatctagtggaaaatcttaagaataaaactacttacctcctgtgacaaccacccgccccaccaccccagactaatgccgagcttgttaagtctcgtcccggaggtggaaatcttaatccccaaatctccactccatccccggggatccgccccactgtaagtgcagaaggcgggaaagtgagccgaagagcgccgcacacggccaaccggggagtcctcatccactccggcccactcggaaaagctgggatgcgggataaggggatggtggtggtggcagcgacagggaaggcaaatgggggcttcccacacacagctccaggacccaaggtcaggaactctccatctccgacccaagcctgattcccaaaacacgcccagcgatccaagactccagatgcctgaatccaaactctagcccaagacccttgagtgccgcctcctgcccaatatccaaaatccctattagacggcctcaatgagacgaaccccacgtcaacacccccaatgccaggcccacggccttcttcgactcacgaccgtgacctctgaagccagtcacaaacccctagacctgctggaatcagaatcccccttcccacaggagactggaacccgtgctcagaacccctgcccccaggccaaggccccacccctccgattctggcctggcacccggattcccgcccggcctccgtccctgaccccggaccctcaccccagcctgacctggcttcatggcgagccctggtttgtgcggctccggagtccgcggcgttcacaactccacgagtccggggctttcgcacgtggaaaagagcgcaggcgcgcggcgacgtgcgctgcgtgacgccaccccgtagtcccgcccccgggccccttccccgcccggagctcggcgcacgcgcagtgagcctggattctcgagcctgtcgacacgcaacccgctgccctcgctctctgccttcccagcctttgcctgtgcagcggtcgccctaaactcgcttccggtttcctcttccccaatgcgagcaccccaataatcagggctcatagccttcgcacgggctgtgccctcttttgtattcctagctaaatccctctggcccctgtacacccaaaaaggcttccccaatacatttccagccccaagaacagtgaccgactctgggcttccattcaaacatccgaaaaacatttacagtgcacctcgtgtgtaccaggtgctgttctaggagctgggaatacagcggtgtacgagacataaaaatctccactctcctggagttcatctttttaatggaggaaatagacaccaaacatgttgaatgtttgaaagcgataagtgctttggagaaaataacagcagggaaaggggatagagattttggagggcaaatgatttttgtttttttggcacggtggtcaaggaatgcatcaggagacttttgagctaaagggctgaaggaagtgaggagtgaggcatgcacctatctaggggaagagagttccaggcagggaaaagatctgcagatgcagaggccctgaggaaggaaagatatgggaagttggagagacaatgaggagggtgggtggggcaaagtgagcaaggtggagagtaagaggagataagggcgggtagctaacaagggcagattgtgcggagctttgtgggacatagtgaggacttaggcagtaagatggaaccatggaagggttccaagcagagaaggaatgtgatctgacacaggtccctctggctgcatgtgggaagcagactgcaggagtgagggtgaaagcaggaaaaccaaggactggctgctgccgtgaatcagaagaaaaggatggacagatcagagtgggggcagagagcggcgtcaggggtcaacagattctgcttaagtattaagaattttgggctttgtaattgtgtaatatcagtatccatccctatattcattctgcaaagcaagacaactgctgttatgagaagttaccgaaaaactccagaagaacctaccagtccagagcctagatgttgactctgttccattcactgctctatcactctaggcctaggacagccctctgggtgcccagtaaatgtttgttgaatgaatggatggcctcataccgttgtgagttctctgtgtacagtgttccagctgtggaatgccaccaatttgcacagaaacattcctgaaagattgtttagatattatgatggaaaatctgcttaaacttttcagaaccggtcggggcagtggctcacacctgtaatccaggcactttgggaggccgaggcaggaggatcgcttgagcccaggagcttaaggccagcctgggctacagagtgagaccttatctttacaaaaaataaaaaattagctgggtatggttgcttgcacctgtagtcccagctactcaagaggctgaggcaggaggatcctttgagcccagtaggtctaggctgaaatgagccatgactgcaccactacactccagcctgggtcacagagcgacacccctgtcccaaaacaaaaacaaaaaccaaacaaaaaaaactttttaaaaactatgagatgaaatagttgagtctattctggatttctagatgtgcaatgattccagtgggtccaattccggataatgttacctatttcacatggattttactatttgccttctaattaatatttttcttctaaaggacaaaagtactcagagtgcagtgcagatttaggggattccagccctatttcttggaatcctggcaccatctcctgcttctgagatactttgcctgctagcttgctctgaagacctgaaattggctctatcggtaagtaattagtggtggaggtgcctgttggtcttgtgctggggacacaatggtggctaaaacagccccgggtcctgtcctcctggagctgccagtccaataggagagacagacaggttcccaaacagtgttggcccagaggggtcagggctgggacaggcagaggggtaggagggcaatgggggaagcaccggcagaaatgggactggggagccccaggcagggggctcagggccaggataggggaggcccaggcagagaggtgggagggggatggaggagacactggcaggcagggcagggcagggatagcgaagcccttgaggacttttcccaatattccccatttcctcaactccctctgaaccttcctgtgaccttcttgctctaaggaggactctgccctgaagacctccctttccaagcggggctgttttctccttctcggccttcatgtccactggatctgtagatgggagaagagcgtccttgctcctcactggcacttctaaaccattgtctctgcctcctccctgaaccctaggtctgaagcttacacagtcacactgtagcacctgctcccctttgtgctgctagacccattgactcccaagtcacctctgctcacctcgtcatttagcttcaggctcactgtcacccacaccactcctgtcattattcttggtgattttcaaattcaggtaaatgatccttttaccactctggcctcttggtgccttgacctcctctcccccactgcacttgtcctccacccaacccttctttcccatgatcacacctagaccttgtgctgggaacacacaacaacacataactgtgacagccccagaggtcccagcctggtgggggagaaggacccattctagatggcaacagccgcataaccacagcccctacagaatctcagctccatgcatctcacgctctgcccgtcacctcctgtctctccagctcactccttctaaagattgcaccagtgagccttcagccctaaccatccattaagctgtctgacttgttgctatccctcccccaatcatggccacaccactctcaactacctagccagattccccaccatcattattaccacacctttgcatacctccaaactatgaactgaattcaaccctccatttattctgcacctgcacccctggcagctgaatgtggatggagaaaaatacagaatcaccctggctggtctcggttttgattcatgactacaaacccaaatgcttaatgctgaccagcaatcctatcacttgcccccagtctattcattctccattttttcccaccctgttgatggtatagataacacatggccatgggctgaattgtctccccacacattcacttgttgaagttctcacccccattgttatggtatttggaagtgacagcattgggagggattagggttggaggaggtcatgagtgtaaaccctcattatgggattagtgactttattattattattattatttttgagacagagttttgctcttattgcccaggctggagtgcaatgacatgatctcgtctcacggcaacctccacctcccaggttcaagcgattctcctgcctcagcctccagagtagctggcattacaggcatgagccaccacgcccggctaattttgtatttttagtagagacggggtttctccatgttggtcaggctggtctcgaactcctgacctcaggtgatccacccaccttggcctcccaaagtgctgggattacaggtgtgagccaccgtgcccggccaggattagtgactttttaagagggagagagggagagatgcaacccaggaagagggccctcacagagaatcacatcaatcagcaccttgatcttggactttccagcctccagagctgtaagaaataaatctctgttattggaaccattcagtctatggtattttaagacagcccacacaaacaaacacacatgtattaatttttaaaactttattaaggtataatttacataccataaaattcacccattttggcttggcgcggtggctcatgcctgtaatcccaacactttgggaggccaaagcaggcggatcacgaggtcagcagtttgagaccatcctggccaacatggtgaaaccccatctctactgaaaatacaaaaattatctgggtgtgatggtgcatgtctgtagtcccagctactcagaggctgaggcagaagactcgtttgaacccgggaggcagaggttgcagtgagccaagatcatgtcactgcactccagcctggcgacagagtgagactctgtctcaaaaaaaaaaaaaaattcacccattttaattctattgttcgtttaattctggtaaatttacagttgggcacccatcaccacaatccaatttcagaaaactgccaacaccccatttcatacaaatggaatcatacaatatgtagcctttttttttttttttgacttagcataatgttccacattgttgcaaatttcttttttatggctgagtatttcattctctggaatttcactggtctgttcacctgttgatgggcttttgagttgtttccagtttgggttattatgaataatgctgccatgaacattcatgtacaaatatttgtgcagatttactctaatttttcttgggacaagccctaggagtaaaatggctgagtcatatgctgagcatgtttaccttttgaagaaatgggaacacttttttccaaagtgattgggcctattttatttcttttagtttcttttttttatttttttgagacagagtcttgctctgtcacccaggctggagtgcagcggcgtgatcatagctcactgcagccttgatatccaaggctcaagcaatcctcctgcctcagcttcccgagtagctaggactataggtgcccgccaccaggcctggctaatttttgtgttctttctagagacaggtgtctcactatgttgtccagctggtctcaaacccctgagcttaagcaatctgtctgccttggcctcccaaagtgctggaattacagacgtgcaccactgcacccagcccagacccatttttttttaagaattattttacactttctcctctttcttcaaaccttaaaactttctcctcccttcttactctttgttgttcgtcttgcttccaaggagatagaagcaatgacaagagaaccccaacatccttctatcccaatacctatcagccgccccgcacctgttaccatgtatgctggcttcccatgtgtgactgtggatgactctctgttacccatcgcagtgcctagctgtgtgcaggtttgttatataggtaaatctgcacatgtaccccttatataggtaaattgtgtgtcacgggtttgatatacagactattttgtcacccaggcaataggcatagtacctgatagatcggttttcttttcttttcttttttctttttttgagacggagtcttactctgttgcccaggctggaatgcagcggcgtgatctcggctcactgcaacctctgcctcctgggttcaagtgattctcctacctcagcctcccgagtagctaggaccacaggcacatgccaccacgcctgcctaatttttaaaatttttttgtagcaatggagactcactatgttgcccaggctggtctctaactcctggcctcagcctcccaaagtgccacattataggcatgagccaccactcccagccataacgttctgtattttgacagaggtttgggttcatttcaaaacaacaaatttattctttagatgtgtacatttcactgtgtgtgaattttacccccaaaaaggaactgtacacaaacttgagctccagttaatgctacgtgtgctgaagtatttagaaggaagcataatgatgtctgcgacttattttgaagtgtgtgtgtgtatatatatatacaaatatatgaacacatatataaatatatatacatgtataaatatacatatacatatatatatattttttttttttttgagatgaagtttcgcttttgttgcccaggcaggagtgcaatgctgagatctcagctcactgcaacctctgcctcccaggttcaagcaatcctcctgcctcagcctcctgagtagctgggattacaggcgcccgccaccacacccagctaacgtttgtatttttagtagagatggtgtttcaccatgttggccaggctggtctcgaaaacctggcctcaggtgatccgcctgcctcggcctcccaacgtgctgtgattacaggcgtgagtcaccacacctggcctgaaaagtgtattttaaaagagggatcaaaggctgcatgaagggatggatcaacggatggatacataataaaaccagtatagcaaaatgttaattacagactctacatggtgggtagatgggttgtctccatttgttttgtgctgccataatagaattcctgagaccgggtgatttataaggaagagaaatttatttctcacagttctggagacggggaagcctaagacgaaggcaccagcatctggtgttgggtgaggcccttcttgctgtgtccttacatggcggcaggcagaagggcaagcagggacgaacactgtgtcacctcatggcagaagatcagaagagagcaaatccaatcccaaggattacagcagtgttaatccactcataaggatgcggcctgagccctcaggacttaaacacctcctgttaggccccacctcccaagacggttgcactgggggttaagtttccaacacatgaattttgagggacactttcagaccataccaggagtgctgactgtatatttcttcaaactttctgcatgtttgaaaagggaggagagggccgggcatggtggctcacacctgtaatcccagccctttgggagtctgaggcgggcggatcacgaggtcaggagattgagaccatcctggctaacacggtgaaaccctgtctctactaaaaatgcagaaaattagccgggcgtggtggcatgtgcctgtagtcccagctactcaggaggctgaggcaagagaatcacttgaacccgggaggcggaggttgcagtgagcagagatcatgcctataatcccagttactcaggaggctgaggcagaagaatcgcttgaacccgggagacggaggttgcagtgagccaacattgcgccactacactccagcctgggcaacagagcgagactccatctcaaaaaaaaaaaaaaaagaaagaaaagaaaagaaaagggaagagagggatttaaatagatgcaacacagagaacttttagggcattgaagccattctggatgtcactctaataaagcatgcatatcatgacacagaacatgcaccaccaagagtgaaccctaatgtaagctatggactttgggtgatgaagactgtcaatgtgggttcattgatgataacaaaggtgacactctggtgcttgatattgatagcaggggaggctgtacatgggtgtatagtatggggcaggagatctaggggaactctccatatgttccactcactattgttgtgaacacaaaattgctctttaaaaaagtctattttaaaaattggccaggtgtgacagctcatgcctgtaatcccagcactttgggaggccaggagaggaggattgcttaagcccaggagtccaagaccagcctgggcaacatagcaagacaggaataatctccctgtctctacaaaaatacaaaaattagctggcattgtagcacacacctgtagtcccagcaactcgggaggctgaggtgggaggattgattgagcctaggaagttgaggctgcagtgagccgagatggcaccacagcactccagactgggcaacagagtgagatcatgtctcaaaaatataaataaataaaaatttttaaaataaaaatttaccttcaaggccagggatggtgactcctacctgtaatcccagcactttggatgaccaatgaccaaggcgggaggattgcttgagctcaggagtttgaggctgcagtgacctgtgatagcaccactgcactccagcctggacaacagaatgagaccttgtcttaggaaaaaaacaatacattaaaatccactggaaaacaacatgaacaacttctcttggcttcacattctcctctagccatcacctccatctctctgggttctttttttttttttttttttttgagacagagtctcactctgttgcccaggctggagtgcagtagcacgatcttggctcactgcaacctccacctcccggattcaagcaattctcctgcctcagcctcctgagtagctaggattacaggcgcccgccaccacacaccacacccgactaatttttgtatttttagttgagatggggtttcaccatgttggccaggctggtctcgaagtcctggccttaggcgatccacccgccttggcctcccaaagtgctgggattacaggcatgagccccccgacctggcctctctgggttctctataactaaactccttgaaagaattttctgtacttactgtcctcacttctcctcatcttttctcttggacccattccagtcaggctttcctctccatcactccaccaaaatagcttttctcaaggtcaccaaggtcctccatattgctaaagctggtgatcaatttcctatcctcatcttctttgaccatcagtggcatttgacactgcctcctgcttaatatgctttttccacttagctttcaggactgccaccttttcctagagccctcccacctcactagccaccctctctatttcttcactagctcccctcatcttcccggtcttgtttccttagggtgccccagggctcatgcttcagcctccttctcttttctatccatgctgctcctctgatgatccaaccattcttttcattgtattaaaaactggcaactcccacatttatctctcaagcctaaacttcttccttgaactccagactcacatgtccaactgcctaattgacatttctactctgatgtagacatgcattaacaaatgcatgtaggccgggtgcggtggctcatgcctgtaatcccagcactttgggaggccgaggcgggtggatcccctgagatcaggagttcgagaccaggctgaccagcatggtgaaaacccatctctacaaaaatacaaaaattagccagacacgatggcgggtgcctgtaatcccagctactcagaaggctgaggcgggagaatcacttgaacctgggaggcaaaggttgcagtgagccaagatcacgccattgcactccagcctaggcgacagagcaagactccatctcaaaaaaacaaaacaaaacaaaaaacaaatgcatgtaatttgcatgcacttggtggtttaaaccacaaatttgctgtcttaaaccaacagaaatttattctctcaaagttgtggaagcaagaagtccaaagtcaaggtcaaggcagcgaggccctgcctcactgccttcaaaagctcgatgggaaaatccatttctttccttttccacctcttagggactgctgacattccttggtttgtggcggcatcactgcaatctctgtctccatcttcactttgccttctctgtgcttgcttccctcttacaaggatacgcgaaattggccaggcacgtggctcacgcctgtaatcccagcattttgggaggccaaggcgggtggatcacctaaagtgatcccagctactcggaaggctgaggcaggagaattgcttgaacctgggaggtggaggttgcagtgagccgagatcgcaccattgcactccagcctgggtgacaagagctaaactccatctccaaaaaaaaaaaaaaagaaaaaagaaaaaggatacaagtaattacatttagggctcacccagataatccaatccaggataatctccctgtctcaagagccttagcttaatcacacctgcaaagaccacctacccacataaggcaatatttgcaggttcaagagattaggatctgatatctttgcgggggtgggggcatttttcaacctaccacaaaacatctcaaacttaatagtaggtgctcaaacacatttatttattcattgatttattttattttttattttgtagagatgttttccgggctggtctcaaactcccggactcaagggatcctcccacctcatcctcccaaagtgctgggattatggtgtgggccatcgtgcctggcaaaaacacatgtattgaatgaatgaaggaatgtccacagcagggtcataagagctagcattgagtacacctgtcagcgaaaactcaaattagaaccaagtgtgcaaaactttgcggaggctgttatgactaggaccttgatgacttgatgaattttctttttaacttatgtaacaaaattttaaacttttcacaaaaagtagagaatatgagaagtccccatttattcgccacctggcctcaacaactattaacatgtaaaacagccttgttttatctattgcccctccatctttttatttttttctggagtattttagagcaaacctcgataatatgccatttcacttccaggtacttaagtatgcatctcttaagaaaaagaagagaacattttcttccattatcacacctaacaaaattaacaagaagtcctttttataatctagtagccagtctatatccatattccctcaatggtttaaagtatgtgatttaggctgggcacggtggcttacacctgtaatcccagtactttgggaggctgaggggggaatggatcacctgaggtcaggagttcgagaccagccgggctaacgtggttaaatcccatctctactaaaaatacaaaaataagctgggcatggtggtgggcatctgtaatcccagctactcgggaggctgaggcagcagaatcacttgaacctgggaggcagaggttgcagtgagccaagatcgcactattgcactccagcctgtgcgaaaagagcaaacttccatctcaaaaaaaaaaaaaaagaaaaaatgatttaaacagtactgctggctaggcatggtggctctcatgcctataatcccagcactttgggaggccaaggcagatagatcacttgagatcaggagttcgagaccaggctggccaacatggtgaaaccccatctctactaaaaatacaaaaattagccaggtgtggtggcgcacacctatagtccctgctactctggaggttggcgcatgagaatcactttaacccgggaggcagaggttgcagtgagccgagatcacaccattgcactctagcctgggcgacagagtgagactccatctcaaaaattaaaaaataaataaaaaattactgcttgtttaaatcaggatcaaaacaaagtcccttcatttggtgtgtgttctctctcttgcacgcacacatacatataagctttttagccaagagtcttcagagattataatttatttatttgttacatagagacagggtctcactatgttgcctaggctggtcttgaactcctggcctcaagcaatgcaacctggcttcccaaagcactgggaatacagacaggcatgagaaatgccaggctataatttatttactttagatcttatttggggggagtacaacatgctaagagaaaagtacatgtaactatggttttatgaagtatcacaaagggaagaaaccacataaccgccactcaggtcaataaagagaacatgaccagtacccccaaattccccttttggctctactcttaggggtcttttcatgtgtacactgttctaaccttgcttccttcactccataatatattatgaagatcacccccagaacagcttatagagatctttcttatatttcatttatctggatagtagtctggtgtgtagatgaaacgtcgtttagtcaaccagtctaccaatagaaaattgacttagttgtttccagtcttttttccttacaaagagtgttgcagtgagcaacctgggctcgttgccggtggaaggtgtccaggttctgggcgttttgaacaaagaactggacaaaacgcaccaacgaaacaaccaacaaaagaatgaagcaaagaaagcatacatttattgaaatgaaaagtacactccacagggtgggagcaggctgaacagacacactccacagaccaggaagcaaccaatcagaggctgaagtgaaggtacaaagttacaccctatgcaaacgtctgatgggtcgcgggaggggaccaatcagaggctgaagtgaagttacagagttacacccctatgcaaatgaagactaggcccatgaccagtctgattggttgtgggagactaccaatcagaggcactttccatctttcatcggccacgcggggaggggaggggaggggaagcccgccggggtcgggggttgcgaagggagtagcctctgatccttttgttacttgggtgtggaaagttgggattttccttttgattccgttctaggaagtcagtgcaaatcagccttaggtttcctgcctctagactattctcctgcctcagcttacatccttttattgccaatgtatctttaagttggattcctagcagtgagatcagatcaaaagataaatgcagccgagcgggggggactgctcacgcctgtaatcccggcactttgggaggctgaggcgggtggatcacttgaggtcagaagttcaagaccagcctggccaacatggtgaaaccccgtctctactaaaaatacaaaattagctgggcatggtggcgcatgtctgtaatcccaggtacttgggaggctgaggcaggagaatcgcttgaacccgggaggtggaggttgcagtgagtcgagatcccgctaccacactccagcctggctaacaaaatggactccatctcaaaaaaaaaaaaatttttttttaaatgcacctgcaatcttgttagacactgccaaatgtcccttacaccttggacttacacgttgtgcattcccactggtaacacagaagagtgttctttttctcatagtcttgtcaataaattatattgtctaatttttgtgactttgctaatgggtgagaagtagtatcgcagggtagtttaatttgcatttctctttatatgagcagaattggacatttcttaggttttgtttgtttgttttttgttgttgagacagagtcttgctctgttgcccaggctggaatgcagtggcacgatcttggctcactgcaacctctgtctccccgactcaagcaattctcctgcctcagcctcccgagtagctgagattacaggcgtgtgccagcaagcttggctaatttttgtattttcaccatgttgggcaggctggtctcgaactcgtgacctcaggtaatccgcccacctcagccttccaaagcgctgggattacaggcatgagtcacagtgcccagccacctccttaggttttaaggcaatttgtatttccttttctatgaactattccaatcgtttgcatatttttctactgaaatgttgctttttattctttatttttaggacctcttaattctttctctcgaagggaaattgatccccagcaatggttgacagcaaaattaaatagaaagcactggctatggtagaggacacatctggattcaaatctggcctccattatttacaaaccgtttgcccttgggcaagttatttaacttcactgagcctatttctttgtctattcccgtttcacagagtaattatgaagttcagaaatactgtacacaaagaacatgacacattgtatgcattcaacatgtttagattcctcccaattgcctgtttatatcctcaacccatgtttttcttttcttttttcttttttttttttttttttgagacagagtcttgctctgctgcccaggctggagtgcagtggtgtgatcttggctcactgcaacctctgcctcccgaagttcaagggattctcctgcctcagcctccagagtagctggaattacaggcacataccaccacgcccagctaatttttgtattttttagtagaaatgggggtgtcaccatgctggcaaggctggtctcgaactcctgacctcaggtaatctgcctgcctcggccacccaaagtgctgggattacaggtgtgagccaccgcacctggccaacccagttttttctaactgggttcttgtctttcttattgaaggatctctttgcatattgtggatattaatcctttgttaggtttgttgcaaagctttcctgcaagtttgtttttacttatttattcattcatcagtaggtgtactgagcacctactatgtgacagagactgtgctaggagctgcaaataaagtagtgaaagaagcagatactgtctctgcccttaagttatttctaattggagagaaaatcaaacaaaattaattataaagtgtgacaaaggctaagaaggaatttagcaaaagggtgggacagaaggggatccacttttggtggggtggtcatgaaaggcctaagttattaacattgaagatgacattgaaggatgagaaaaagccagtcatgtcatgaatggagggacaagcatattataaaggactgaagtggcaaaatgtggcacattcaataaattgaaagatcacattcccaaatcataattggcagggagaatagtgataggagatgagtcaagaggttggcaggggcctcacaggacaaggtgaagaaatttgactttattataaatgtatataattattatatatattatataatatatatatttatgtatataattattatatattatataatatatatttatgtatataattattatatattatataatatatatttatgtatataattattatatattatataatatatatttatgtatataatcattattattatttttttaaaggacaggatcttgctctgtcacccaagctggaatgcatggcacaatcatagctcactgtaacctcaaactcctgggcttaagcaatcctcccacctcagcctcctcagtagctgggactacaggcctgcaccaccacgcttggctaatttttaaattttttgtagagacaaggtcttgttatgttgcccggctggtcttgaactcctggccccaagtgacctgtttctattttaaggaagattctcatggcagctgtgacaatggattacagaagagaaagagcggacagtaggctaccatgttgttgacagaagttaggataatggcttgtaccagatggtgacagtgggcataataagaaaggtagatttcaggtatgttttttgttttttttgtcgagatagaatcttgctctgttgcccaggctggagtgcagtggcacaatcttggctcactgcaacctccgcctcccaggctcaagcaattctcctgcctcggcctcctaactgtgattacaggcacccgtcaccatgcccggctaatttttgtatttttagtagagacagggtttcaccatgttggccaggctggtctcgaactcctgacctcatgatctgaccacctgagcttcccaaaatgctgggattacaggcgtgagccaccatggggccttgggtatgttttgaaacagttcaacatgatttgttaaggaactgagtggaggacaaaggagaggaagaaataaaaaataattcccctggccgggcacggtgcctcacgcctgtaatcccagcactttgggaggccgaggcgggtggatcacaaggtcaagagatcaagaccatcctggccaacatggtgaaaccccgtctctattaaaagtacaaaaattagctgggcgtagtggcgcacgcctgtaatcccagctacttgggaggctgaggcaggagaatcgcttgaacccgggaggcagaggttgcagtgagccaggattgtgctgctgcactccagcctggtgacagagcgagactccatctcaaaaataataacaataataataataataataataattcccctattttcttgctgctgaacttactgggtggtaattgtgctatttaaggaggtagggaagaccctcatgggaaggggacagatttgaaaggaaacaaagacttcagtgttttacttgttggttgcattaacacattaaatcttcactccagctctataagtactatcattaactctactttaaagatgagaaaactaatccagagagaaattaagtaacttgctagggttataaatgataaagccagaatctattgatctttctccattttccactccttccctccatccaatcatttatcttctctttttattgagacagggtctcactctgttgaccaggctgaagtgcagtggaatgatcatggctcactgcagcctcgacctctcaggctccagtcatcctcccaccttagcctcccaagtagctgggaatacaggcaagtgccaccacgcccagctaatttttatattttttgtagtgatggggtctcactatgttgcccaggctgatctcaaacccctaggctcaagcaatcctcttgccccagcctcccaaagtgctgggattacaagcgtgagccaccgtgcctggccatttatcttctcatccatccactcttctaatcacctattgcctcatcttcctagttccccacacaccattttctcaattcacccatccatctcttcatccatccatgcaatcatccatccatcctcccagcccccaataaatattcatcacgtgccagattccccaggcacctgatacctgctgtgcaggaggaaagtcagggatgagaaggcatgagacagacacaatgacatgcagcttagcttaagatatttattcaatgctctcacatttggcctctgtgacccagaaaagcggtagagcagggtaggagcacatgatgcatccttcagccactgcaacctccagagggaccaggtcttcttcaggaaatcttcgttcctggtggatgactgatcagccataactgcaagacacagacatttagcacctccgcttgcagactaaacacccaccctgactgccctcatcccatgaggatccaggtgcctttgccccaagaagcctggtttccatactacatccctcaccatggggagaagtcctgcgctctccatttctccatcgctggcttctcctgggagtcatgccaatcattggtctggtccccgtcaaagtttccacaggccccacacagtttcccagcatggtcattgctgacaatcacagccaccttcccattggctccaagccacacctggacccctgccttctggcggactagcagggagccatcaggtgtacgactcacggacacagatgctaacttctcagctgggagatccactcggagaccattcacctggtgggggatgcccagcaaacacagaggtgaggccacagccccagaatagctgggtgttaccaggatggaggatggagaccccaaacaagataagttcatggagctaaatcaaagaggcaggtgctgaaagagatgaagacctggatgtttgcactatttggagcaatggatacatgagaagatagctagagatctggatagacggataaaaggatggagagtggagggatggagagacgtacccatggatctacacaacaccccaaagtcggtgggggaagcattttgtaccagacagataagcaaacagacagacaaacaatcaaaccccagggtcatccttatggttctagttttctttttcttttcttttttttttttttaagatagggttttgctttgtcatcccagctggagtgcagtggtgcaatcacagctcactgcagccctgacctcctagactcaatcaatcctcccacctcagccttctgagtagctgagactacaggactacagatgtgtgccaccacaccaggctaatttttgtatttttttctaaagatagggtctcactgtgttgtctaggctggtcttgaactcctggattcaggtgatctgcctccctcagcctggttctagtttgcaaaataaaacaaactttgagcacatcctgtaagttattggttccctaaccaaaacaacgttatcctttatttttgcaatgctgatgtctgaagataagtaatgactttagcaaatataataatcatgtgagaaaattactttttcttcatcataggctgcagatccagtaactttgtgagtttttcctttacataactgttgtctatgttagttggtgaattaacccttctaaagttagattccctagagaaacttccttaaaagacttgtcttttttttttttttttttgtaaatccttcttttgtttgtttgttttttgttgttgttgttgttgttttgttttttggttttggttttagttttttttttgagatagagtcttgctctgtcgcccaggctggagtgcaatagcgcgatctcagttcactgcaacctccgcctcccgggtccaagtgattctcctgccttagctgggactacaggcatgtgccaccatgctcggctaatttttgtatttttagtagtgacagggttttgccgtgttggccaggctggtctctaactcctgacttcaagtgatctgcccgcctcggcctcccaaagcgctgggattacaggcatgagccaccatgcccagccctctaaatgcttttgtatctgagttttcctctgccagatgattggagagataggtagatagatctgaaaagacagatgggtgggtgggtgggtgggtggatggatggagggatggatgggtggatgggtggattggtgggtggatggatggatggacagatgggtgggtggatggaagaaagaaggaagggaaaaagactagaaggaaggaaataggaaaaagagaagggggtagaatagatgctggaaggaaggaggggaaaagggaggatgggtgtagtgaaggacagatgaagactagtggatggaaagtctcagtagggtgcaagctttccaagtataacgactgagtccgagtcatctctgttacccagcacatggcctggcacaaaaggagcagggctgagtttattcacaaaaccagccttttactgagtaccctctaggtgccatgccctgatctgggtactgggaacaaactggtgaccaagatggacaggatccctgcctacctgcggcttatagtccagtgatgaacaaagatgctgagcatcttctgggagtttccttctaggagtctggaattttggtaggtggataccaaaaccccaggcactgagactctatgaatttccctggcagatgacatttcatgtttcatcacaactttgttgctggaggaattaagcacatcctgtgtgactctaccgagaaaggactctcggaagcttgcacatgatttcccctggactttgtgcgatgcaccttttccctgtgtcaatttcacttcgtatcttttccctatgatacatcttagccctaagtacaactatatgctgagtcctgtgagtcctagtgaatcactgaaccaggttatgggaaaccctgacacattatgtgaccccccacccccagccttgaccaatcacggaacttcctccctaaagtcacagtgattggctccaggggtgggcatgtgacccaaactggctcagtgagatataatcctgggtcttttattgaaccattttctgttaaggtagataagctggtggggtgtaggcctgggcagctgggcgggggtcgtctttacacctgtaagtggaaagcctgtttgagaacaaagctgatttggcaaatagcaagtctcaaagacggaagtacaaatttctgataatattgccagggcacctagatccagccattcctgaggctctatcctgggattttctagctacatggactaataaattcaattttgcttaaggcagtttgaatttggttttaagtcacttgcaacccatagagtctcgattcatactaatgtcaaaactattaagttgcttgagtatgtttttgctcctctagaactcagccagaacagagggaccaagtttgaaatattgagataaatacaaatccagagactaaaccgcagagacctggataaagaaaacagatcgcaagacagaaaggaagccaggaatgtggggacactgtaatcagaagagcaaaagcccagggagacattccctaccccctactcacaaacttacccacacacccttgtttggagtcaacgtcaccatcccatcctggaagaagatgtggacctggcccacagcctccgttttgccatggcagatctggacttcggcaactacacggtaccaggggatggtattctgtagtcctgggcagcgggaagagagctcatagacaccaggagaggtggtggcaccacgggccccatcaaaggtggtgaggttggcacccacagacaggacacagagaccacgggtggcccagcagttccgggcttcagccttgacctcacatacacggcctggtgggcagccagctgcctggcatgtcaggccagagcttgaggaacaggaacagcgctcgctgcagtctgaggtcagcagggaggagtttacctgtgcacagaaaggggccaggttatggtggtgggatggatcgcaaaaatggccacactgcttgaaccctctgtatccatgcagagtgactttacagactcccattaagaaatagagtttatttccccctccctatgaatctgggttggccgtaagactatatttaggtcaatgaaacacagaagaagcaatgttgtaacaggtttaagcctagacctcaagagacctcacagcttctctttccttctctctctctcacatacacagaatcctgcccagccaccatgagaacaagcctgggctagctccctagaagatgagtgaccccatggaacatagataactcttccagctcaggccaccctagaccaggcagccttcagctgacccaccagctgactacagatattatacatgagtaagcccagaggatagcagaagaaccacccagccaagtccagcctaaactgcagtcacaaaattgcaaactaaatgaataattgttttaagccacaacgttttggagtgatctgtaacccagcaaaagctaactgatacaggtaagaaatgaagaaatgtaattaacaaaataaatgccatctctacaatgatgatttccacatctctaggccagacctctcccatgaaggccagactcacaaatccaagacttcgggcataggcagaggggtcagggcagagatggggaagcatagggagctgaggggttcagaggaggcacctaacccagcctaggggatcaaggatggcttccagtaggcagtgagacctcaaggaaagagcaaaatttggctccatttgcaagcaatgcaagttagtgctgcatgttaatggctagcctcgggctgacttctctatgtcacaatttcttcatctgtaaaatggggaaaatagtcatagtatctattgcataggattgttgtgattattaaatgaattaacatccagaacatggccgggagaggtggctcatccctgtaatcccagcactttaggaggccaaggcaggaggattgcttgagcccaggagtttgagaccagcctggacaacatagcgagatcccatttctacataaaaattaaatagtcagccagggatggcagtgtgagcctgtggtcccagctactcaggaagctgagacagaaagatcgcttgagcccaggagtttgaggctgtagtaagccgtgatcatgccaccgcactcctgcctgaaagacagagtgcaatcctatctcaataaataaataaataaataataacacccataacaaacatggtgcatagtaagagctcaaaaaaattattaacaagaataaatcaattcttcaatttaattcatattattaaacaattattagctgggctacctatttgcactgttgtaaactgctatttctttttttttctttttgacatggagtctcggtctgttgctcatgctacagtgctgtggcacaatctcggctcgctgcaacttccacttcccgggttcacgggattctccttcctcagcctcccgagtagctaggactacaggtgtccaccaccacacccagctaatttttgtatttttagtagagacggggtttcaccatattggccaggctggtctcgaactcctgaccttttgatccgcccgccttggcctcctaaagtgctgggattacaggtgtgagccactgcgccccgctgtaaactgctctttctttttactgagtgtgatgaacatgcagggcaaggcccagtgctcagtgggtatctttcctgtataatcgggcctgatcctcagatacctatggtacaaagatggtgattagtcccattttacaggtgaagaaaatgcagttcaaggaggggccaaatgatgcccccgccccaagatatcaggtcctaatccctgtaatgagtaaatgtcaccttatatgggaaaagtgtgtttgcagatgtgattgaattaaggatctgaagatggaaaatttctcctggattatctgagtgagccttagatgcaatcacgtgtatccttataagagagaagcagagggaggtgttatgacacactcagaagaggaggcagaggttggtgtgatgtggccacaaccaaggaaaacctgcagcaaccagcaactggaagaggcaacaaacagattttcccctagatttcttttttcttttcttttcttttcttttttttttttttttgacatggagtctcggtctgtcacccaggctggagtgtagtggcgcaatctcggctcactgccacctccgcctcctgggttcaagtgattctcctgcctcagcctcctgagtagctgggattacatgcacgcaccaccatgcccggctaatttttgtatttttagtagagacagggtttcaccatgttggtcaggctggtcttgaacttctgacctcgtgatccgcccgcctcagtctcccaaagtgctgggattacaggtgtgagccaccgtgcctggctcttttccttttttctttagaggtaaggtcttgctctgtcacccaggctggagtgcggcagcgtgatcatagctcactgcagcctccaactcctggggtcacgccattgtcccacctcagcctcttgagtagctgggactataggtgtgcaccaccatgcccagctaattaaaaaaacaattgtatgttgcccaagctggttttgaattcctgggctcaagtgatcctcccgccttggcctcccaaagggctgggactgcaagtatgagccactgggcatggcctcccctagatttctctggagggagtgccaccttgccaacaccttgatgtcagcccagtattcctgatttctgacttttggccttcagaactgtgggagaatgaatttctcctgtttaagctaccatgtctgcggtaattggttacagaagctgcaggagactaatagggggaggttgcctgcatcaagtcacatagctgggatatggcggtacctcctctgtccccagccttgaagaggtcagcacagaatctctgggtctctctcaagctcttctaccctctctgcccaccccaagcccctactcaccggcaagtatcggccattatgggtgcagccacaatcttggacagggatgcagacaccctgggaaagcaggaagcggtcgtcgcactcacagccctcaaaacagcgggtggtgcagcccgtgaggccggagagagccgcacaggatccctggcaggtgcgagtgcagatggagtagtggctgtgggcggggcaatggagcgctgcagagagaggaggcagggctgagtcacacctccaaagggtcctggataaccaagggggcctactgcacacccagccctgttttaggcggtgctgaggacacaaatactgagaaaagtctcaaccccagtcctacagagctcacttccagtgggacagacaggaagagcccaaagtgaacatgctgcatcagggagtgtagacagagaggtcagggtcagggtggggaggcacaggcagaggggtcagggcaggcatgagggggcaaaggcagaggggtcagggccagggtagggggctacagacagaagggtcagggctgggatggggagggcacagacagagggttgagggccagggtagggggcacaggcagaggggtcaggaccagggtcgggggcacaggcaaagaggtcggggccagagtgggggcacacaggcagaggggtcagcgccaggatggggagggcacaaacagagggttgagggctggggttgggggcacaagcaaaggggtcagggctggggtgggggggcaaaggcagaggggtcagggccgggatggggagggtacacacagagggttgagggccggggtagggggcacaggcagaggggtcagggctgggtagggggcacaggcagaggggtcagggccagggtgtggggggcacaggcaaaggggtcagggctgggataggggggcacaggcagaggggtcagagttgggacaggggctatatggacccaagggaattatctgtggtaagtccctggtctctggctaagcaattggtggaggtgtggctgttctgcaatgcccaccaggtttggggaaggagcatcaggctgggggtgaaatgctgattttatttgggaacacagcaggtaagagggacggtaaggacacccaggggaaggtgtcttggacaccctaacaattaccacagactttgtagcttaaacaggggaaattcattctcccacagttctgaaggccagaagtcagaaatcaggatcactgggctgacagtcaggagagagttcagggcttgagacagacagaccaggtccatggtcaacaatgagaacaaatctaaggccgcgggtgtggatgaccgccctgggtataggtcctgcccaggggagacctggctctgacctggagccgaaggggccattgctttttcctgagagtctctggtgatgtccctcccatggggaattgaatgagaggtacagtcctagtttagcggggtgtttaatagcctgcagccttgtcttggggggatctgaggggatatggtcttgtcgggggtagaaggagggtctgtgtgagccacagatctcccaacccatccaactctccctttcaggtcactgcagaaagagtccagaatagaacactagggaagaagagaatttgaggtttgagcagagtgggcccagacaggaggctgagaaggaacagtcagagggatagcagggaagccagtggactatgccgtgggagaagaagttgtgtgggtgtggggtgggagggggtggggagggagcgcttttacagggagaaaccactccgacatgcaaatagaaggaatgggccaggaggggcccctacacctggtctagagtcctgcgagggacccacggacactcacggcagaagctgtctgtcctccagggcttcacggccacgccagctgcctgacaggccgccgtgtaggctgccaggctgcggcacaggaaggctttgtcacccttttgcgcgcacaggtcgtatacgcattggcggaagtactcagagggactcagcaccgcctggcaggtcgcgaaggggccctgggggttccggagctgcccgcaggcctcgttgctctcatagggtgcagtctcctctgccaagcacactgggcagccttggggcccgcagccctcgccacagcccttggaggagccgggcgcccgccatgcagccccgaaggtctccacactggacgctgctgagccattgggcaggacaaagtcgtcactccagttgccattgaagttcccacagaggccacagagccgtccacggaaggggctggggatggacatgaggaggtgggcatcgccatcaaagagaagccgcagccccttggtcgtctgcagaaccatgtttcggccctcggcggtcacccgcacgcggcccacagccacaggcagggccacagcctcgccgtccacggtgacctgggtggaagggtcgggtaggtcaggaactcacagaaccacaggcaaggctgtcctgtcccactcccaggccagagctgcatctccctcagtcccattaacgtcaggtcatgtttcccttaaacttcttgggccccaggcctggcgtggtgactcacacctataatcccagcactttgggaggcccagacaggtggatcacttgagcccaggagttcgagaccagcctggccgtgacagcaagacctcatctctaccaaaaataaaaaattagctaggcatggggggctgaggtgggaggattgcttgagcccagcaggttgagcctgcagtgagctgtgatcacgccaatatactccagcctgggtgacagaacaagaccctgtcacaaaacaacacaaaaatctcccacggtgggaccattcaccaaaccttccagggtaggtaccagagttcccatgttagaggaatgtccctctcatacctacagggtggggtcgtgtctccctcagaaccccctagatggggctgtgttgccttcagacccccagggcaggctcacatggactcacctgctgcccctgagctaggctcacaacctggccagccacagtaaccaggaggcgttggagatctccagctgcattcttctcaagcacgatggaaaagtcctcgtccccaggctttgggtggcagacttgggccaagacataggagcaggagccatgcaggtcgtagacacggccatcaagggtgatgtagtggatgcccccgttggccaggcagcggccacagcctgtggcatgacaggcctggacaccatcctctaaccggcactcctcatggggcccacaggctgcgccctcctggcaggtgacatggccacctggcccacactcacagcgccgctcacactcagggcccgggtagaagacctcgcccagtgggtagtagcggccatcatggaggcagccacactggcccacgggtacgcaggtgtcaccactgagtacgaagccagcatcgcagacacagccttcacggcaggccgactcacagccctcgggtgctgagaggctcgggcagctcacagggcaggagtcaccgcagagctcatagtggctgtgggcagggcactgcaaggctgtggggacaaggtgggcatgagccaggtaggtgttcgagtcggggtcttgggaggccctgagtgggaaaactgctcaggccaacttgagtgtctctgtgtatgcacatgtgatccaggacatctaactgggggactcagtgtgggacctggaatgggaggggacatgccctggtctctctgaccaggttatgtgttagcctgaccaaatatttctgaagatcaaatgactctgcttgcctgatttttatttatttatttatttatttattttttatttttttgagacagggtctcactctatctcacccaggctggagtgcagaggcgcgcttactgcagcctccacctcctgggctcaagcgatcatcctgcctcagccccccgagtatctgggactacaggtatgagccaccacatctggctaatttattagtagttttctgtagagatggggtctcactatgtaagccaggcttacctgggtgaaatggatcacttatatctattcggggtatgcaagatcagaactgactatgggtacctcagcgtgtgaatgtgactggggtgtggggccacatgtatctcagggtatggctctgcctgagggcacccagctgtgggtgtctgacatgcagcatctcccagagtccttctgacatggtctgcctaagggtgtgcctgggtgaagttggcaggatacctgtgaccaggagacctgcctgaagggaaccgcctaggactatctaaccatgcatctgtgtggatctgcccagggctatgtaagagtcctgattctatctgagtgtatctaaccagttagtctcagtacaaaatctgagcagataccactgaaggtatgtgacttattctatgtgactaggtgtatttcagtgtgtgcaacagaccaagggcctctgaccagctgtaactcactaggtcttcctaaccaggggtaccttgctgtgtgactgaggcagagtcagccatcccaatctacatgccttggatatctgagagcatggatcaccaatcctcaacagtgtcctggaccccaggtttctgactaggtgtttcttttctttctttctttttttttttttgagatggtgtctcactctgttgcccaggctggaatgcagtgtcacatcatggctcactgcaacctctgcctcctgggttcaagtgcctcagcctcctgattagctgggattacaggtgcccaccaccacgcccagataaatcttgtatttttagtagggacagggatttcaccatgttggccgggctagtctcaacttcctgacctcaggtgatccacctgcctcggcctcccaaagtgctgggattacaggcgtgagccaccacgcccacactctgactaggtgtttctaactctctctcactgcagtacctttcttggggcatttcagtgtgtgagtgccaaggtgtttggtgacaggagataccaagctcagaggaaggaaagtggcccctgagccccatggaggaggaaggggctgctgtcctacagtcctgggaagggcagggagagacccaaccatgtggaccatgcatggagcagtactcacgacagaagtccggccgcctccactcgccgagctgggccccagcggcctgacaggctgccacgtaggtagccactgcaggacagaggcctccaggatggccctgaacttggcaggcgtccagcaagcagccctggaagtactgcgcgggcggcacaaggccgtggcagggtgccagcgggccgtcggtggcggagatcacgccgcaggcgtccgggccgccgaaggactcctgctgctctggggtgcacggcgacgggcatggcttggacacacattccccgcagccctgggccccgcccacctgccatccagcgggcttcccgcccacagccttgaggtcgtctgcggggtcctggttgtagttcccgcataagccacagagagaggccgcgtacgccgccggcacgcgcaggcgcacgaagctgtccccatcgaaagccagcgagagccctgaggttgtggtcaccaccacgtcggcgccgctcaggtgtgcgtgcaggagcgagtccagctggaaaggcagagccacgaacacgccgtcgacctgcgggcgggggatggcggcggggggatggggcgcggtgagtggagagaacacgggtttgaatcctggccccaccacctactagctgtgggacccagagcatgtcacctcccctctgaaaataataatgagcatctataggccgggcctggtggcaaagcctgcaatcccagtactttggaaggacgagatgggaggatcacttgaggtcagaagttcagacccgcctgggcaacatagtgagacccccatctctacaaaaaaaatgaaaaattagccagcatggtggcctgcgcctttagtcccagccacttgggaggcggaggccaaggcgggaggatggattgagcccagcagttccaggctacagtgagccctaatcctgtcactgcactccagcctgggcaacagagtcaggctaagaaaagaaagaaagaaagaaaaacagaaaagaaaaaacaaagagcctctataggctcatgtcactgactcctcatccttctcaaaaacaggtactttcttagaccagtttacagaggaatacactaggctcagagaggaagaagccgctgtgccaagccaccaggctcctaggcgtacactctgacccttccatcatgccccagctaagctgtgaaaggggcccaggggaatggtgaagcccttaccatctcaggcaaccccagagctggcacttgctcctgtctggcccacagccctcctcacctgtagcttccggggccagcgggcactcagtgtcaggctgtggttgtagatttgcagggtgacactgcgggtgtagctgacagcctggctgccccggtgctcattggctacagtgacagtgaagttctcagcccccaagggtggtccgtggcagggtgcactcagcaggtactcgcaggtgccttggaaatcgaatcggtgcccatccagagtgacgtaatgggggtcaccccacgcctggcactcagctgtgctgacgggctggcagccgtgctggccggatggcaggaggccacacacttcacccagcccacagctggcaggtgtgcagaccagcgagccacccccaggcccgcagcgacaccactgggagcaggtgccatcagcccaaaactcactgcccgcctcgtggtaggtgccattggcccagcagccgcagccgttgttgaggggaacacagcggtcagcacttaacacgaaacccgcgtcgcactggcagccctccacacaggggccctcacatacggctggcgtcgtaaggggtgcaggggacggacagctggctgggcagggtgggccacagacctcatagtggctgttttctgggcaggtgatctctgtgggcagacgaaggagcaggaaggagagaaatagagagaagggtgtcaggggtggggtcccaggacagggtgggaggagacagagatactagggagcagacagaaaaagggagagacagaaaacaagacacagagaggacacagagaaagaaatgggagagggcgagacaccaggagacccaagcagaaactgagggagctagagaatgagaaacagacagatagacacaagcaaagcgaggcccagagatgagcaccaagagacagagagacaaacagagaaaaaagaaaacaaagagacccagaaggaccagagtgaaaccaaaccagccccgaagagacgggaccccgccccccgccccacctctgctcccccaacactcaccacagccaacctgtgcccgccagtcttcgatgacaaccccagcggcctggcaggcggccacgtaggaagccagagccttgcaaagaatgtcacggtccccaccacccatgcagacgtccagaacacagcccttgaagaagctctcaggtggcacatgagcatggcaggtggtgaaggggccccctgtgccagatgaaaggggtccgcagaagccagggccctcgtactgctccaaccggtcctcagggcacgttgggcaggacccccgacattcgtcccaacacagtgggtcccagcctggggctcgccagctgccgccccagatgggtatggagggagccagtgtgccattagggaagacctggtcattgttggggttgcggtccatgttaccgcagagcccgcacactgcgccatgatagctgctggggagcgtcacgtctacccgccagttccagtcatagctgacttgcagtccaaagtcagccaccagcagtgccttcgatgcaccctgggccactgaaatccgcccgtcggccacggagacaggcaaggctgtgagcacaccgttcacctgggggaaggagggaaggcaaacgggtcactggaggttttacggccccagctctggccctctgcctccctctctctcatcccaccgggggctgggagaggccagggccttcccccgagagttggattgtcatctgacacactgtggacagttgttctagcccaggtcttggggaacgaaacctcactttactttttctagatcttctcccttcatctctatctccctcttctgtctctctgtctctctgtctttctgtgtctctctccctctgtcttcacctaagtctatatcacttggtcttctctctctctctttctgtctctctgtctatctctccctcctcttcccttcctccctcctaccctcattctctgtgtgtctcttccactcactcaccatcatttatccagtgcctactctgttccatccctcattttctctctgtgagctaccattaagctctatctccatttccctgggcagaaaggatagcccatctgtctcctctgatctccctacatatctccctatatttctttctttctttctttttttttttttttttttttgagacagatcctcactctgtcacccaggctgcagtacagtgtcgaaatcttggctcttgtaacctccacctcccaggttcaagtgattctcctgcctcagtttccagagtagctgggattacagtagcaccaccacacccagctaatttttgtatttttagtagagatgggggtttcaccatatcggcgaggctggtctcgaactactaacctcaggtgatccacccgcctcggcctcccagagtgctgggattacaggcgtgagccaccgcacctagcccgatctccctgtatttctctctgtgtcctggtctctgggtctctcacttgttccctcacaaacactcaaacgactgttcacctggactagactctgagctcagcatgtgacatgcacggccttgctgtgggggaggccctgatacgatgcccacttcacagatgaggaaactgaggcctaccaagtgaactgcccagcatcacatagctcataaggaggagaggctggattgaaacccaggtctataaaaaaggcaaatgctgaggtcctatgttaaagccctttgccaggggctaggctcatttaattcccagtaacagggtgacatttttgctgcaattattctttttgttgacagtttgtttcaggcccaggtgaagacaaagagccttgagctgctaactgtggtcgtcaggatccctcctgccctcccggggacctcaggggaccatcctgccacacatacccggactttgccgatctcgtccttgtggatggagatgttggtgccgagggcagccacggtgacgactctcacgtaggacacagcagggttgccccggttctggttcttggtggtgacggtgaagggtgtcaggccctgggtgctgacccccgggcagccagttgttgccagcacatagttacaggtgccctggaagtcaaacttccggccatcgaaggagtggtagtgtgggtcgccccacagccagcacgtggcctcatagttgggcaggcacacgccctggccaccctgctccttgcatgtctcctgtggccggcatgtcacgccgtggcacgggtctggggacagaagagggaggaggaccttgaggggctgcccattgtaaagcatggccgctccctccatatctacccagtctgtgccagggatctgagggttactgcaggcaagaccacattccagagtcctcatgtctaggacccacttcctatagtttgcttttatattttcttttgttttgttgtttttttgagatggagtctttctctgtcacccaggctggagagcaatggtacaatctcggctcactgcaacctctgcctcctgggctccagtgattctcctgactcagcctcctgagtggctgggattataggtgcccaccagcatgcttggctgatttttgtatttttagtagagacagggtttcaccatgttggccaggctggtctcgggctcctgacatcaagtgatcagccaaccttggcctcccagagtgttgggattacaggcatgagccatcatgcccagcctgctattttcaagaccagcccctgggagtcgcacacagctgacactgaggccccatgggggactgtgtctaagtctcggctgtcaaaggtcccataccggagacctgggccccagaggtctgtacagccaagacccagtacctagagttcccctacctctgagactgaggccctgccatttgctgtgtgagactgagatcctggagtccacgcacctaagaccaaggcaaagaccaaggctctgggtctgtgtttaaggtgcactttccatggtgcccttgcttgagatttcaccctgttcttgtattttaagttttataggaacctcaccgtcttcacttacataggctacggctgctttcacaccacagtggcagagtgagtagttgtgatccagaaggtatagcctgcaagcttaaacacttaccatctagccctttagagaaaaggtgcacttgaccccagttgagatctgtgccccaggggtccttgtgtctgcgatgccagccctgagagcatccatgtctgagatcccagccccagggttctctgtgttcaagacctgggccccaggccaggtgtggtggctcaggcctgtaatcccagcactttaagaggctgaggtgggaggatagcttgagccctggagtttgagactagcctgggcaacatagtaagaccccatttctacagaaagattaataaattagccaggcgtggtggtgtgtgcctgtagtcccccactactcgggaggctgaggcgggaggattgtttgagcccaggaaatcgaggctgcagtaagctacactacactctagcctgggccacagagtgagaccttagctcaaaaaaaaaaaaaagatctaggtctcagggtcccccatgcctgagacctcagccccctggacatctccacatttgatagaaattggtctccaatttctctaggtcctggaggcctctatgcccaagactagggccctggggtgatcttctggcaagagcccagtgccagggtctcagcaggatttgaaatgtttgagaccctaactagctaagtctcatgggctgggctccctcagtgcaagactccatccctgagggttgctgtattcaagacagtagccttcatcgtgtctcactgctgaggccctgtcctggggggtttctgtgtccgagaccctgttcgtacagttactacatctgtgaccccagcttgcggaacccctgtgtgggagaggccagccttcaaacgtctccttcctcctgtgtccattatcaatgtaccgcctctcagcttcaaatacacccacggagttaagctttgtcaacagagggcgccggagagtcactgcaggagggagggtctccgggtctggcttctagccagtttggtcctttcagctctggccagggtgcggggccacattcagcgagtgccactggccgcagctggcttcccagtgaggggttcccttcttgccaagtccagcctgcagaaacctctgtgccacccagtgggctacagctgcagtgagactggactcagccttggggctgattctcccctccttgaagaggagggaccaatttctcccttccatgaggcttttaacttagccctagagtggcggctacttcctgtgtgtgctttggtggtattctttagtgctctctttaccgtttcttatttctgtttatttgtttgtttgtaaagagacaaggtcttgctgtcttgcccacgctagagagcagtggtgcaatcatatagctcactgcagcctcgaaatcctggggtcaactgatcctcctacctcagcatcctaaatagctgggaccacaggcacgcatcaccacacctggctaattttcaattttttgtggagacaggggtctcgctatgttgcccaggctggtctcgaactcctggcctcaagtgatcctcccaaagttctgggtgtgtgagccacggcaccagaccctctttacccttaatagttaatctcctattaataagtaagtgattctttaattaaactttcctcattcaaatggccatacgctttctgtctctcgactagatgctgagtgatataccccccattcctgggagtccccattatcctgctcatcagccctgagagtcttagcccccactccttggtgctggagctcccattctcttatccttagggggaggagagttctctgctcttcaccctaagaaatgagccctgggggtggctgtgtcccagatttagtctgggggattcccacatcagagactatacccctagaaatcctgatcttccagttaagaggggtccccatatccaatgtcctgccttggtgaggtctccgtgcgtgagactcagaactctgctctctgtccctgcccctgggatcccaatctctcccctgccctttggtgctagtgtctgaaccccaagcccgatcccacacatcagtgttccgctcatgatggaaccctaggctgctgctcttgtattctaaagtcttataggaacctgacctcttcacttacatagtctacggctgctttcatgccacagtggcagagtgagtagctggaacgagaacctacagcctgcgagcttaaacatttaccatgtagcacattagagcaaaggcgcgcctgtccctgccttataccgagggtctctgacatccaccctgagaaaactatctctgagggtccccacagcctggattttccctaagggtccctacctcccaaagtaggtggccctggccctgtgaaacctggtctagggttccccaggtctgcaacctcaatcattagtcctgtacacctcccgccatggacaccccagttacactaccctcagccccagagtccccatcctccatccctagtcccatcagccccagtcccagcccagcccagcccagcacctttggtgacgcagctcaggatgcctccggagggctggcacacctgccccggcttgcagctgtgttcctggcacaccacgactttacccacatggcacgtgcactgctgccgacagttgtcaatgaggactgtctgctccggctgtggggagagagggaacggccatcagggacaccacgggtgggagccgactctcacatctctggcgttctggcacagaggggtttggcagacatcacagacaagggacatctctcagcaggatggccccttgtctgtgaagctgaggcacagcatggctttggggccatcattcattggttcattcacttttcttcatttactcattcattccaaaatatccactcaacgtctgctgtaggagaaatggtgtgacacagtaactaagggcagatcgcctgggcttgaagcccgtttctgctgtttccaaagtgtgtgactctgggcagttacttcacctctttatggctcagtttcatgatctgcagattgcagatgatagtagcgcctgcctttggaaatataactgagttatattcagataataaccaagttatattcagataataaccaagttatattcagacatgtaaaatttagataaaatgaaaagggtaggccgggcgcggtggcacatgcttgtaatcccagcactttgggaagccgaggcgggtggatcacgaggtcagaagattgagaccatcctggctaacacggtgaaaccccgtctctactaaaaatacaaaaaattagtcgggcgtggtggcgggcgcctatagtcccagctactcgggaggctgaggcaggagaatggtgtgaactcgggaggcggagcttgcagtgaggcaaaactgcgccactgcactccagcctgagtgacagagcgagaccccatctcaaggaaaaacaaaaacaaaaacagaaaagggtttcctttaaaacattcagataggagagatacgtggggtagacatcaaacaagatcgggagaatatggcttatttttgaagctaagtgatgggtaagtacatggacagtcattccactattctcttaatttttgcatgtttgaacgttttcagaataaaaagtttttagatatgtaatgcatatataaaaatatgcacacatagcacttaaaacggtaccagatacatagtaagcactatctacacattttctgttattattaatattatttatgtgaggagaacaacagagagagggttccacccctaggagagctcacagtccccaagggagatggacattagacaaacacatgctccagtcaaagaaaaaggacctacggggacagagtgggagagggaagtagagggtgttagcagctggtataacacatggaaatcttgtctttgtggtcagaaaggctcccttcgtccagacctggaaggcaaagccacaacttgacctggggagtcaggggagggtttaaagcttcagagcccgtggtcatatttagaaagatctttaccactgccacgtggagggtggaccagagggagcagaggtaggagctgggagggacccaggtaggagaggaccagctggaccaagggagggccatggggacggggaaaggagtgggtacaagagacactgaagagactgagtggactagctgtggtggctcccgcctgtaatgctcgcactttgggaggccaaggcaggaggatcacttgaagtcaggagttcgagagcagcctggccaatatggcaaaactccacctctaccaaaatacaaaaaaattaaccgtgtgtggtggcacgtgcctgtactcctagctactcgggaggccgagacaagagaattgcttcaacctgggatgctgaggttgcagtgagcttgaacccgagaggcggaggttgcactccagcctgggcaacagagcaagactatatctttaaaaaaaaaaaaaaaagaggctcagtgggtcgggcatggtggctcatgccattaatcccagcactttgggtggccaaggcgggacgatggcttgaggcctggagttcacgaccagcctgagcaacatagtgagacgcccccatctctatgtgtccacaggaaaattaaaaattcgctgggcttggtggtgcgcacctatagtcccaggtacttgggaggtgaggtgaaggattgcttgagccaaggaatttggggctgcagtgaactatgatggtaccactgcactccagcctgggtgacaagagtgagaccctgactctaaaagaaataaataagaggctaagtagacaggccgtggggctgatgaacagtgggaggggtgagaccccatattctgccccagatgactaggttcctacctcatagtagacaccattgtggtagcagccacattgctggatgggcacgcaggcttggccgttgtagaggaagccggagtcacactggcagccctcagcacacccatctgggcactgcagaggggcactgagagccgagcagcccagggagcaggtgtccgcacagagctcgtagtgactgttctgagggcattccatggctgcaaggagggggtgccgatcagagccctggggagggaggggctgcaaagcccagggtctaccccttctgtgcctcaagctctcccctccctgcccctccggctctccctcactcacgacagaaagtttcattcctccagggctccacgtggcctccagccgcctggcaagcactcacgtaggcatggatgttgctgcagagaatgctcaggttcccaccacccaggcagagatcaaagatgcaatctttcaagggaccctggggatccaccagcttgtggcaggaggacagtggccctgtggggctggagaggagcccacagaactcctccttctgatacttcttctccagctcgggaggacacttgtcgctggggatacagcccgcgctccccggcgggcaggtgggcggcggcaggcagggagagtcgggcaccacctcctcccaggagttgccgaactcattggcgttgcctgcctgcgagccattgggcttctggaagtcatccttggggtcgccgttgtagttcccacacaggccacacatcagctggtagtagtttccagggacggtgacccgcacatagtacacaaggtcgtaggccacacgcaggccgaagtcggtctcaatcacaacatctgaaccatgctgggaggcacggatctggccgttggccagcaccacgggcagcttcatgtccacaccgttcacctgggaggggaagagaggcaggccacgcttcagaaagtatactttgagtgagggtgggaccctagttcaagcccatgcctgatgctgatctttgtgacctcacctcttaggccctcagtttcctatttattaaatggatataataacagggcctgatagtagattgaatggtggtccccaaaagacatattcacacagaatcccatagcgtgagcttactcggaataaagttctttgcagatgtaatcagggtaataatctcaacatgagattatcctggattaaattgggccttaaatccaatgactagtatccttataagagccagaaagaaaaaggcaaagagacacacagaaaaggccacatgaagatgaaggcagggattagaatggtgttgtcacaagcccagagaacctggagtctgcagagctggaaagggaaaggaagatcccccaaccagtgtctttggagggggtgcagccctgcccacaccttgatgttgaacttctggcacccaggactgtggaacatacatttctagtgttttaagccaccaagctcgtggtaatttgttatggcagccatgggaaacgaatacaggtctcgatgaagtaacaagcctccagctatcctttgtttaccgcttgctgcagccattaataagcaatgatcgcccccggagccacttgcccgagttcaaacagtttcccccttaccctctttgtgaccttgggcaagtgagtcacctctccctgtttctgtttcctcatctatcaagtgggaataaggcgtttgccccatggaactgttgtcaggatcacataaattagtatctgtaaagtgctgagaaacgtggctggcatagcatgcatgcttcaggagcatttgctgttattagcagctatgagtggaagtttttcttctgaagagtaaacagaaccacaggtttttgctttaaagcatcagcgagtggaaagttaggctaaattcttggggaaatgaacttaaacctatgagctgaggaccagtggtttcagttaaagatttactaggctccaacaaagcctggtaaatccacccctggacagggcacagtggctcatgtctataatcccagcactttgagaggccaaggcgggaagatcacttgagcccaggagttcaaggtcagcctaagcaatatatcgagatcctgtctctacaaaataaaaaagaaaacaaattaactgggcatggtggtgcatgcctgtactcccagccactcaggaggctgaagtggtaggattgcttgagagcaggagtttgaggctgcagtgagctaggatcacaccactgcactccagccttggtgatagagcaagaccctgtctctaaaaaataaataaatacatcaacccctgattaacatgctttcttacccttccttatcacagacagtgcacaccggattcttttggaaatgtgaagaatcagaggagaaggcaggagaaagacatgctcctggctgagtctcctaaaaagatggtcaactgccacacttcccaagcagggctgggcggtgggtaagggcaactgacttagccttgcctcagtttcctcagctgtaaactgcggggtaataagagctcccacatctgtagggaagctgggggtttcagtaagaagcaactaacaagaacatcaacaactcctgtgtatttaggcgctgtatgtcaggggctattctaggagcttgggaaacattagggaatatattcaattaagtcctgcatgtcggccgggcacagtggctcatgcctctattcccagcactttgggaggctgaggccggcagatcactgagctcaggagttggagaccagactggccaacatggtgaaacccgtccccactaaaaatacaaaaatttcctgggcatagtgttgcacacctgtaatcccagctactctggaggctgaggcaggagaatcacttgaaccagggaggcagaggttgcagtgagccgagatcgcgccactgcactccagcctgggtgacaaagccagactctgtgccaaaaaaaaaaaaaaaaaagtcacgcctgtccagttcgccagattaagtcagtaattgatcagcaccttcgccaatactgccactagaaaaacagctgcgtgtctgtttcagtgggatctcaggggaaacccctccactgtaactcagatgccagtctccacatgagaccaaatcttctcagtaagaaaagcactgcagagcagcacggggttcaagctccacctttgctgggggactatgggccagtgatgggccatcccactctgaaaaataaagcaagtcatagtgcctgcagtccctgttgcaagcatacagacaccatggacgtgaagtgcctggcagccaaaaggtgtgcagtcagctgtatagaaactatagctgctgttgttgttgttaaggcggtgagagtgtcacccacagattgtcctctgtccatgaagcttctcaaactcggactttctcaacctctgatggcaccacgtcctgccaataagtggcagactagggaggtgagtagggcagaatccaggactgaggtggagagaggatggagtgggagggaggagagggtgggagaaatttggagagaaaagtcaatgcatggaggtaaagagagggtggagactgagggacagagatgggggagcagctcccaagtccctgatgacacctccctcattggcttcccactcggttctgactggcatcttctgtcctcagagaccccaggcctcgcacatgcactctcatctcttgtgcccccaactcctgggctgagcgctgcctgtgccccacctacccacaggcccctcgccccctgctccccatctgctctcaccgtgaccttccactgtctctgctccagccgcagggtgaagtttgccacctggaccgtgatcaccctggtcacactgactcgcccattaccccaggccacgttctcctgcaggacggcaaaccgatgcaggccaggccgggtgccgcaggtctgagccagcacatacacgcaggtgcccatgaagtcgaagcggtggccatcgaaggtggtgtagtggggatctcccgacgcctggcaggtggtagagcccacggccacgcagcccaagctgccaccggatggccggcaggtctcatgcgggccgcagctggagggctcacaggacacctcaccgccctcccggcagcggcaaagggaatcacacccagggccagggtagaaggtctggcccagtgggtagtagcggtcatcgtggaggcagccacactggcccacaggtacacacgtgtcaccactgagcacgaagccagcatcgcagacacagccttcacggcaggccgactcacagccctcgggtgccgacaggctcgggcagctcccaggacaggagtcaccgcagagctcgtagtggctgtgggcagggcactggaaggctgtggggacaaggtgggcatcagccaggtaggtgtttgagtcgcagtcttgggaggccctgagtgggaaaactgctcaggccaacttgggcgtctctgggcatgcacatgtgatccaggacatctaactgggggactcagcgtgggacctggaatgggaggggacatgcccaggtctctctgaccaaatatttctgaagatcaaatgactctgcttggctgatattttttttttttttttttttgagacaggctctcactctatctcacccaggctggagtgcagaggcgcaatcacagctcgctgcagcctccacctaaacctcaagcaatcctctggcctcagcctcccgattagctgggactacaggagtaagccaccacatctggctgatttattattattttctgtagagatggggtctcactatgtaagccaggcttacctgggtgaaatggatcacttatatctattcggggtatgcaggatcagaactgactatgggcatctcagcgtgtgaatgtgactggggtgtggggccacatgtatctcagggtatggctctgcctgagggcacccagctgtgggtgtctgacatgcagcatctcccagagtccttctgacatggtctgcctaaggctgtgcctgggtgaagttggcaggatacctgtgaccaggagacctgcctgaagggaaccgcctaggactatctaactatgcatctgtgtggatctgcccaaggctatgccaggatcctgtttctttctgagtgtatctgaccagtcagtataaaatttaagcagatatcactgaaggtatgcgactaattccatgtgactaggtgtatttcagtgtgtgcaacagacctgggccctctgaccagctgaaactcactaggtcttcctaacaaggggtactttgctatgtgacagaggcagggtcagccatcccaatctacatgccttggatacctgaaagcatggatcaccaatccctaagagtgtcctggaccccaggtttcttttctttctttttttttttctgttgtttgttgtttgtttgttttttgttttggagatggaatctctgtcacccaggctgaagggcagtggcacgatctcggctcactgcaacctctgcctcctgggttcaagtgattctcctgcctcagcctcctgagtagctgagattacaggtgcccgccaccacgcccggataatttttgtagttttagtagaggtggggtttcaccatgttggccgggctagtctcgacctcctgacctcaggtgatccgcccgcctcggcctcccaaattgctgggattacaggcgtgagccaccgcgcccacactctgactaggtgtttctaactgactctctctcactgcagtacctgacttggggcatttcagtgtgtcagtgccaaggtgtttcctgacagtagataccgagctcgggaaggaaagtggcccctgagccccatggaggaggaaggggctgctgtcctacagtcctgggaagggcagggagagacccaaccatgtggaccatgcatggagcagtactcacgacagaagtccggccgcctccactcgcggagctgggccccagcggcctgacaggctgccacgtaggtggccactgcaggacagaggcctccaggatggccctgaacttggcaggcgtccagcaagcagccctggaagtactgcgcgggcggcacaaggccgtggcagggcgccagcgggccgtcggtggcggagatcacgccgcaggcgtccgggccgccgaaggactcttgctgctctggggtgcacggcgacgggcatggcttggacacacattccccgcagccctgggcgccgcccacctgccatccggcgggcttcccgcccaccgccttcaggtcgtctgcggggtcctggttgtagttcccgcataagccacagagagagcccgcgtacgccgccggcacgcgcaggcgcacgaagctgtccccatcgaaagccagcgagagccctgaggttgtggtcaccaccacgtcggcgccgctcaggtgtgcgtgcaggagcgagtccagctggaagggcagagtgacgaacacgccgtccacctgtgggcagtgggggagcggtgaacggagcaaacacgggtttgaatcctggccccactacctactagctgtgggacccagagcatgtcacctcccgctgaaaataataatgagcatctataggccgggcctggtggcaaagcctgcaatcccaggactttggaaggccgagatgggaggatcgcttgacgccagaagttcagatcagcctgggcaacatagtgagacccccatctctacaaaaaaatgaaaaattagccagcgtggtggcgtgtgcctttagtcacagatacttgggaggtggaggccaaggcgggaggatcgattcagcccacgagttccaggctgcagtgagccctaatcctgtcactgcgctccagcctgggcaacagagtcaggctaagaaaagaaagaaagaaagaaagaaaagcaagaaagaaaaaaagaaaagaaaaacaaagagcctctactggctcatgtcactgactccttatccttctcgaaaacaggtacttttcctagaccagtttacagaggaatacactaggctcacagaggaagaagctgctgtgccaagccatcaggctcctaggcgtacactctgacccttccatcatgccccagctaagctgtgaaaggggcccaggggaatggtgaagcccttaccatctcaggcaaccccagagctggcacttgctcctgtctggcccacagccctcctcacctgtagcttccggggccagcgggcactcagtgtcaggctgtggttgtagatttgcagggtgacactgcgggtgtagctgacagcctggctgccccggtgctcattggctacagtgacagtgaagttctcagcccccaagggtggtccgtggcagggtgcactcagcaggtactcgcaggtgccttggaaatcgaatcggtgcccatccagagtgacgtaatgggggtcaccccacgcctggcactcagctgtgctgacgggctggcagccgtgctggccggatggcaggaggccacacacttcacccagcccacagctggcaggtgtgcagaccagcgagccacccccaggcccgcagcgacaccactgggagcaggtgccatcagcccaaaactcactgcccgcctcgtggtaggtgccattggcccagcagccgcagccgttgttgaggggaacacagcggtcagcacttaacacgaaacccgcgtcgcactggcagccctccacacaggggccctcacatacggctggcgtcgtaaggggtgcaggggacggacagctggccgggcagggtgggccacagacctcatagtggctgttttctgggcaggtgatctctgtgggcagatgaaggagcaggaaggagagaaacagaaagaagggtgttaggggtggggtcccagaacagggtgggaggagacagagagagacactagggagcagacagagaaagggggagacagaaaacaagacacagagagaggacacagagaaagaaatgggagagggcgagacaccaggagacccaagcagaaactgagggagctagagaatgagaaacagacagatagagacaagcaaagcgaggcccagagacgagcaccaagaaacagagagacaaacagagaaaaaagaaaacaaagagacccagaaggaccagagtgaaaccaaaccagccccgaagagatgggaccccgcccccagccccgcctctgctcccccaacactcaccacagccaacctgtgcccgccagtcttcgatgacaaccccagcagcctggcaggcggccacataggaagccagagccttgcaaagaatgtcacggtccccaccacccatgcagacgtccagaacacagcccttgaagaagctctcaggtggcacatgagcatggcaggtggtgaaagggccccctgtgccgggggccaggggtccgcagaagccagggccctcgtactgctccaaccggtcctcagggcacgttgggcaggacccccgacattcgtcccaacacagtgggtcccagcctggggctcgccagctgccgccccagatgggtatggagggagccagtgtgccattagggaagacctggtcattgttggggttgcggtccatgttaccgcagagcccgcacactgcgccatgatagctgctgggcagcgtcacgtctacccgccagttccagtcatagctgacttgcagtccaaagtcagccaccagcagtgccttcgatgcaccctgggtcactgaaatccgcccgtcggccacagagacaggcaaggctgtgagcacaccgttcacctgggggaaggagggaaggcaaacgggtcactggaggttttacggccccagctctggccctctgcctccctctctctcatcccaccgggggctgggagaggccagggccttcccccgagagttggattgtcatctgacacactgtggacagttgttctagcccaggtcttggggaacgaaacctcactttactttttctagatcttctcccttcatctctatctccctcccctgtctctgtctctctctctgtgtctctctccctctgtcttcacctaaggctatgcctctgggtcttctctctctctgtctctgtctctctctctctctttctgtctctctgtctctgtctcacccttttcccttcctccctacctccctcattctttgtgcatctcttccactcactcaccatcatttattcagtgcctactctgctgcatccctcagtctctccatgtgagctgccatcaagctacatctccatttccttgggcagaaaggatagcccattcctctcccccatctccctatatttctttttcttgattactttttttatttttcagacggagtctcactatgtcaccgaggcttgtgtgcagtgttgcagtctcggctcttgtaacctctgcctcccaggttcaagcaattctcctgcctcagtgtcctgagtagctgagaattcaggagcatcaccacacccagctaatttttgtatttttagtagagacggaatttcaccatgttagccaggcttgtctcgaactcctgacctcagatgatccatcggcctcggtctcccagagtgctgggattacaggcgtgagccaccgggcccagcccagtctccctgtatttctctccatgtcctggtctctgggcctctcacttttccctcaccgacactcaaacgactgttcacctggactagactctgagctcagcatgtgacatgcacggccttgctgtgggggaggccctgatacgatgcccacttcacagatgaggaaactgaggcctaccaagtgaactgcccagcatcacatagctcataaggaggagaggctggattgaaacccaggtctataaaaaaggcaaatgctgaggtcctatgttaaagccctttgccaggggctaggctcatttaattcccagtaacagggtgatatttttgttgcaattattctctttgttgacagtttgtttcaggcccaggtgaagacaaagagccttgagctgctaactgtggtcgtcaggatccctcctgccctcccggggacctcaggggaccatcctgccacacatacccggactttgccgatctcgtccttgtggatggagatgttggtgccgagggcagccacggtgacgactctcacgtaggacacagcagggttgccccggttctggttcttggtggtgacggtgaagggtgtcaggccctgggtgctgacccccgggcagccagttgttgccagcacatagttacaggtgccctggaagtcaaacttccggccatcgaaggagtggtagtgtgggtcgccccacagccagcacgtggcctcatagttgggcaggcacacgccctggccaccctgctccttgcatgtctcctgtggccggcatgtcacgccgtggcacgggtctggggacagaagagggaggaggaccttgaggggctgcccattgtaaagcatggccgctccctccacatctacccagtctgtgccagggatctgagggttactgcaggcaagaccacattacagagtcctcatgtctaggacccacttcctatagtttgcttttacattttcttttgttttgttgtttttttgagatggagtctttctctgtcacccaggctggagagcaatggtacaatctcggctcactgcaacctctgcctcctgggctccagtgattctcctgactcagcctcctgagtggctgggattataggtgcccaccagcatgcttggctgatttttgtatttttagtagagacagggtttcaccatgttggccaggctggtctcgggctcctgacatcaagtgatcagccaaccttggcctcccagagtgttgggattacaggcatgagccatcatgcccagcctgctattttcaagaccagcccctgggagtcccacacagctgacactgaggccccatgggggactgtgtctaagtctcggctgtcaaaggtcccatacctgagacctgggccccagaggtctgtacagccaagacccagtacctagagttcccctacttctgagactgaggccctgccatttgctgtgtgagactgagatcctggagtccacgcacctaagaccaaggtaaagaccaaggctctgggtctgtgtttaaggtgcactttccatggtgcccttgcttgagatttcaccctgttcttgtattttaagttttataggaacctcaccgtcttcacttacataggctacggctgctttcacaccacagtggcagagtgagtagttgtgatccagaaggtatagcctgcaagcttaaacacttaccatctagccctttagagaaaaggtgcacttgaccccagttgagatctgtgccccaggggtccttgtgtctgcgatgccagccctgagagcatccatgtctgagatcccagccccagggttctctgtgttcaagacctgggccccaggccaggtgtggtggctcaggcctgtaatcccagcactttaagaggctgaggtgggaggatagcttgagccctggagtttgagactagcctgggcaacatagtaagaccccatttctacagaaagattaataaattagccaggcgtggtggtgtgtgcctgtagtcccccactactcgggaggctgaggcgggaggattgtttgagcccaggaaatcgaggctgcagtaagctacactacactctagcctgggccacagagtgagaccttagctcaaaaaaaaaaaaaagatctaggtctcagggtcccccatgcctgagacctcagccccctggacatctccacatttgatagaaattggtctccaatttctctaggtcctggaggcctctgtgcccaagactagggccctggggtgatcttctggcaagagcccagtgccagggtctcagcaggatttgaaatgtttgagaccctaactagctaagtctcatgggctgggctccctcagtgcaagactccatccctgagggttgctgtattcaagacagtagccttgatcgtgtctcactgctgaggccctgtcctggggggtttctgtgtccgagaccctgttcgtacagttactacatctgtgaccccagcttgcggaacccctgtgtgggagaggccagccttcaaacgtctccttcctcctgtgtccattatctatgtaccgcctctcagcttcaaatacacccacggagttaagctttgtcaacagagggcgccggagagtcactgcaggagggacggtctcctggtctggcttctagccagtttggtccttccagctctggccagggtgcggggccacattcagcgagtgccactggccgcagctggcttcccagtgaggggttcccttcttgccaagtccagcctgcagaaacctctgtgccacccagtgggctacagctgcagtgagactggactcagccttggggctgattctcccctccttgaagagtaggggccaatttctcccttccatgaggcttttaccttagccctagagtggcggctacttcctgtgtgtgctttggtggtattctttagtgctctctttaccgtttcttatttctgtttatttgtttgtttgtaaagagacaaggtcttgctgtcttgcccacgctagagagcagtggtgcaatcatatagctcactgcagcctcgaaatcctggggtcaactgatcctcctacctcagcatcctaaatagctgggaccacgggcacgcatcaccacacctggctaattttcaattttttgtggagacaggggtctcgctatgttgcccaggctggtctcaaactcctggcctcaagtgatcctcccaaagttctgggtgtgtgagccacggcaccagaccctctttacccttaatagttaatctcctattaataagtaagtgattctttaattaaactttcctcattcaaatggccatacgctttctgtctctcgactagatgctgagtgatataccccccatttctgggagtccccattatcctgctcatcagccctgagagtcttagcccccactccttggtgctggagctcccattctcttatccttagggggaggagagttctctgctcttcaccctaagaaatgagccctgggggtggctgtgtcccagatttagtctgggggattcccacatcagagactatacccccagaaatcctgatcttccagttaagaggggtccccatatccaatgtcctgccttggtgaggtctccgtgcgtgagactcagaactctgctctctgtccctgcccctgggatcccagtctctcccctgccctttggtgctagtgtctgaaccccaagtccaatcccacacatcagtgttccgctcatgatggccccctaggctgctgctcttgtattctaaagtcttataggagcctgacctcttcacttacatagtctacggctgctttcatgccacagtggcagagtgagtagctggaacgagaacctacagcctgcgagcttaaacatttaccatgtagcacattagagcaaaggcgcgcctgtccctgccttataccgagggtctctgacatccaccctgagaaaactatctctgagggtccccacagcctggattttccctaagggtccctacctcccaaagtaggtggccctggccctgtgaaacctggtctagggttccccaggtctgcaacctcaatcattagtcctgtacacctcccgccatggacaccccagttacactaccctcagccccagagtccccatcctccatccctagtcccatcagccccagtcccagcccagcccagcccagcacctttggtgacgcagctcaggatgcctccggagggctggcacacctgccccggcttgcagctgtgttcctggcacaccacgactttacccgcatggcacgtgcactgctgccgacagttgtcaatgaggactgtctgctccggctgtggggagagagggaacggccatcagggacaccacgggtgggagccgactctcacatctctggcgttctggcacagaggggtttggcagacatcacagacaagggacatctctcagcaggatggccccttgtctgtgaagctgaggcacagcatggctttggggccatcattcattggttcattcacttttcttcatttactcattcattccaaaatatccactcaacgtctgctgtaggagaaatggtgtgacacagtaactaagggcagatcgcctgggcttgaagcccgtttctgctgtttccaaagtgtgtgactctgggcagttacttcacctctttatggctcagtttcatgatctgcagattgcagatgatagtagcgcctgcctttggaaatataactgagttatattcagataataaccaagttatattcagataataaccaagttatattcagacatgtaaaattcagataaaatgaaaagggtaggccgggcgcggtggcacatgcttgtaatcccagcactttgggaagccgaggcgggtggatcacgaggtcagaagattgagaccatcctggctaacacggtgaaaccccgtctctactaaaaatacaaaaaattagtcgggcgtggtggcgggcgcctatagtcccagctactcgggaggctgaggcaggagaatggtgtgaactcgggaggcggagcttgcagtgaggcaaaactgcgccactgcactccagcctgagtgacagagcgagaccccatctcaaggaaaaaaaaaaacaaaaacagaaaagggtttcctttaaaacattcagataggagagatacgtggggtagacatcaaacaagatcgggagaatatggcttatttttgaagctaagtgatgggtaagtacatggacagtcattccactattctcttaatttttgcatgtttgaacgttttcagaataaaaagtttttagatatgtaatgcatatataaaaatatgcacacatagcacttaaaacggtaccagatacatagtaagcactatctacacattttctgttattattaatattatttatgtgaggagaacaacagagagagggttccacccctaggagagctcacagtccccaagggagatggacattagacaaacacatgctccagtcaaagaaaaaggacctacggggacagagtgggagagggaagtagagggtgttagcagctggtataacacatggaaatcttgtctttgtggtcagaaaggctcccttcgtccagacctggaaggcaaagccacaacttgacctggggagtcaggggagggtttaaagcttcagagcccgtggtcatatttagaaagatctttaccactgccacgtggagggtggaccagagggagcagaggtaggagctgggagggacccaggtaggagaggaccagctggaccaagggagggccatggggacagggaaaggagtgggtacaagagacactgaagagactgagtggactagctgtggtggctcccgcctgtaatgctcgcactttgggaggccaaggcaggaggatcacttgaagtcaggagttcgagagcagcctggccaatatggcaaaactccacctctaccaaaatacaaaaaaattaaccgtgtgtggtggcacgtgcctgtactcctagctactcgggaggccgagacaagagaattgcttcaacctgggatgctgaggttgcagtgagcttgaacccgagaggcggaggttgcactccagcctgggcaacagagcaagactatatctttaaaaaaaaaaaaaaaaagaggctcagtgggtcgggcatggtggctcatgccattaatcccagcactttgggtggccaaggcgggacgatggcttgaggcctggagttcacgaccagcctgagcaacatagtgagacgcccccatctctatgtgtccacaggaaaattaaaaattcgctgggcttggtggtgcgcacctatagtcccaggtacgtgggaggtgaggtgaaggattgcttgagccaaggaatttggggctgcagtgaactatgatggtaccactgcactccagcctgggtgacaagagtgagaccctgactctaaaagaaataaataagaggctaagtagacaggccgtggggctgatgagcagtgggaggggtgagaccccatattctgccccagatgactaggttcctacctcatagtaggcaccattgtggtagcagccacattgctggatgggcacgcaggcttggccgttgtagaggaagccggagtcacactggcagccctcagcacacccatctgggcactgcagaggggcactgagagccgagcagcccagggagcaggtgtccgcacagagctcgtagtgactgttctgagggcattccatggctgcaaggagggggtgccgatcagagccctggggagggaggggctgcaaggcccagggtctaccccttctgtgcctcaagctctcccctccctgcccctccggctctccctcactcacgacagaaagtttcattcctccagggctccacgtggcctccagccacctggcaagcactcacgtaggcatggatgttgctgcagagaatgctcaggttcccaccacccaggcagagatcaaagatgcaatctttcaagggaccctggggatccaccagcttgtggcaggaggacagtggccctgtggggctggagaggagcccacagaactcctccttctgatacttcttctccagctcgggaggacactcctcgctggggatacagccctcgctccccggcgggcaggtgggcggcggcaggcagggagagtcggacaccacctcctcccaggagttgccgaactcattggcgttgcctgcctgcgagccattgggcttctggaagtcatccttggggtcgccattgtagttcccacacaggccacacatcagctggtagtagtttccagggacggtgacccgcacatagtacacaaggtcgtaggccacacgcaggccgaagtcggtctcaatcacaacatctgaaccatgctgggaggcacggatctggccgttggccagcaccacgggcagcttcatgtccacaccgttcacctgggaggggaagagaggcaggccacgcttcagaaagtatactttgagtgagggtgggaccctagttcaagcccatgcctgatgctgatctttgtgacctcacctcttaggccctcagtttcctatttattaaatggatataataacagggcctgatagtagattgaatggtggtccccaaaagacatattcacccagaatcccatagcgtgagcttactcggaataaagttctttgcagatgtaatcagggtaataatctcaacatgagattatcctggattaaattgggccttaaatccaatgactagtatccttataagagccagaaagaaaaaggcaaagagacacacagaaaaagccacatgaagatgaaggcagggattagaatggtgttgtcacaagcccagagaacctggagtctgcagagctggaaagggaaaggaagatcccccaaccagtgtctttggagggggtgcagccctgcccacaccttgatgttgaacttctggcacccaggactgtggaacatacatttctagtgttttaagccaccaagctcgtggtaatttgttatggcagccatgggaaacgaatacaggtctcgatgaagtaacaagcctccagctatcctttgtttaccgcttgctgcagccattaataagcaatgatcgcccccggagccacttgcccgagttcaaacagtttcccccttaccctctttgtgaccttgggcaagtgagtcacctctccctgtttctgtttcctcatctatcaagtgggaataaggcgtttgccccatggaactgttgtcaggatcacataaattagtatctgtaaagtgctgagaaacgtggctggcatagcatgcatgcttcaggagcatttgctgttattagcagctatgagtggaggtttttcttctgaagagtaaacagaaccacaggtttttgctttaaagcatcagcgagtggaaagttaggctaaattcttggggaaatgaacttaaacctatgagctgaggaccagtggtttcagttaaagatttactaggctccaacaaagcctggtaaatccacccctggacagggcacagtggctcatgtctataatcccagcactttgagaggccaaggcgggaagatcacttgagcccaggagttcaaggtcagcctgagcaatatatcgagatcctgtctctacaaaataaaaaagaaaacaaattaactgggcatggtggtgcatgcctgtactcccagccactcaggaggctgaagtggtaggattgcttgagagcaggagtttgaggctgcagtgagctaggatcacaccactgcactccagccttggtgatagagcaagaccctgtctctaaaaaataaataaatacatcaacccctgattaacatgctttcttacccttccttatcacagacagtgcacaccggattcttttggaaatgtgaagaatcagaggagaaggcaggagaaagacatgctcctggctgagtctcctaaaaagatggtcaactgccacacttcccaagcagggctgggcggtgggtaagggcaactgacttagccttgcctcagtttcctcagctgtaaactgcggggtaataagagctcccacatctgtagggaagctgggggtttcagtaagaagcaactaacaagaacatcaacaactcctgtgtatttaggcgctgtatgtcaggggctattctaggagcttgggaaacattagggaatatattcaattaagtcctgcatgtcggccgggcacagtggctcatgcctctattcccagcactttgggaggctgaggccggcagatcactgagctcaggagttggagaccagactggccaacatggtgaaacccgtccccactaaaaatacaaaaatttcctgggcatagtgttgcacacctgtaatcccagctactctggaggctgaggcaggagaatcacttgaaccagggaggcagaggttgcagtgagccgagatcgcgccactgcactccagcctgggtgacaaagccagactctgtgccaaaaaaaaaaaaaaaaaagtcacgcctgtccagttcgccagattaagtcagtaattgatcagcaccttcgccaatactgccactagaaaaacagctgcgtgtctgtttcagtgggatctcaggggaaacccctccactgtaactcagatgccagtctccacatgagaccaaatcttctcagtaagaaaagcactgcagagcagcacggggttcaagctccacctttgctgggggactatgggccagtgatgggccatcccactctgaaaaataaagcaagtcatagtgcctgcagtccctgttgcaagcatacagacaccatggacgtgaagtgcctggcagccaaaaggtgtgcagtcagctgtatagaaactatagctgctgttgttgttgttaaggcggtgagagtgtcacccacagattgtcctctgtccatgaagcttctcaaactcggactttctcaacctctgatggcaccacgtcctgccaataagtggcagactagggaggtgagtagggcagaatccaggactgaggtggagagaggatggagtgggagggaggagagggtgggagaaatttggagagaaaagtcaatgcatggaggtaaagagagggtggagactgagggacagagatgggggagcagctcccaagtccctgatgacacctccctcattggcttcccactcggttctgactggcatcttctgtcctcagagaccccaggcctcgcacatgcactctcatctcttgtgcccccaactcctgggctgagcgctgcctgtgccccacctacccacaggcccctcgccccctgctccccatctgctctcaccgtgaccttccactgtctctgctccagccgcagggtgaagtttgccacctggaccgtgatcaccctggtcacactgactcgcccattaccccaggccacgttctcctgcaggacggcaaaccgatgcaggccaggccgggtgccgcaggtctgagccagcacatacacgcaggtgcccatgaagtcgaagcggtggccatcgaaggtggtgtagtggggatctcccgacgcctggcaggtggtagagcccacggccacgcagcccaagctgccaccggatggccggcaggtctcatgcgggccgcagctggagggctcacaggacacctcaccgccctcccggcagcggcaaagggaatcacacccagggccagggtagaaggtctggcccagtgggtagtagcggtcatcgtggaggcagccacactggcccacaggtacacacgtgtcaccactgagcacgaagccagcatcgcagacacagccttcacggcaggccgactcacagccctcgggcactgggaggtctccacaggacagcgggcagccgtaggaacacgcctcatagtggctgtggggtgggcagctcagtgctgcagggagaggagacatcaagatcaagaattcctgctcccaggtcaggagttcgagacacactcacatacaagtggtccctcaacacattcgtatgcacacaaacactcaaacacactcacacacaagtggtcccccaagacattcatatgcacacacacgctcaaacacactcacacacacacaagcggtcccccaacacattcgtatgcacacacagatgctcaaagacactcacacacaagcggtcccattgcagggtgcttggggaacacattacatcgcagttaatctgatcctgataattaagattctttcccaatttaactatggtttggagttatctattatggttttttttttttttgagataggggtcgctctgttactcaggctggagcgcggtggtgcttgctatcacagctcactgcagctttgacctcctgggctcaagcaatcctcccacttcagcctcctgagtagctgggactataggcgtgcaccatcatgcctggctaactgttcaaattttttatagagatgcggtctcgctatgttgcccaggctggcctcaaactcctgggctcaagcagtccacctgcctcagcctcccgaagtgccgggattgcaggaatgagccaccacacccagccttctattatgtctttaatgaccttattcaagttggatacatggtgttgatatgtggcatatattttaaacatgcatatgcatatatttctgtgtttgtataatctatgcaatatttgtgaatgcaatacttttagcttcttccttctatagcagtaattaaaatatttagccagtgttataaagaaaaaaagaaaaacctccctgctcccctccccaaactccagtcactccataaaaagcaaatctaagtgactaaaactaaaccacattaaatctctatctgtgctgtcaaatacagtagccactagccacttgtgaccatttggatgtaagttaattaaaatgaaacaaaattgaagatttagctcctcagtcacaacagcctcattgcaagtgctcagcagccacatgtgacctgtggtgacctggtatgtatttgaacagctcaaatatggagctgtcatcattgaagttctgctgggtggtgctgttctgaagctgacatccagcttacaggagaatcatggggacatagggacaagttcaataacactccaaaatagcaactagccagatcctgaaagtatgaaattctgcaggataaataacctatctttcccagtaaataagtgacatagacaaaaggaagagctggatggagggatagctatgtgataaggcaaatgaatgaattagaattagagtgaagaggccgggcgcggtggctcacacctgtaaccccagcatttttggaagccgaggcaggaggatcacttgaggtcaggagttcgagaccagcctagccaacatggtaaaacccgtttctactaaaaatacaaaaattagctgggcatgatggcgcacatctgtaatcccagctacgtgggaggctgaggtgggagaatcgcttgaacccgggaggcggaggttgcagtgagctgagattgcaccactgcactccagattaggcaacagagtgagactccatctcaaaaaaaaaaaaaaagaaagaaagaaagaaagaaaaaagaaaagaaaaagaattagagtgtagagtccaggtggtaggtttatgggtcttcactgtaaaattctttcaacttttttgtatatttgacaattttcataatactatgttgggaggaacaaaggaaggaaattctgacagagtaaaagcaaagaggtagatcaatccaatgcagtatgtgtatttggtttggttctagagccaaacaaaatagaaaaaaacctttttttttttttagacaattgggaaaatttgaacccagattgggctttacatgatgttagggaattaatgttattgttgttactggtaattaccacatgccctcatatctctttctttcttccttcctttttttttttttttttttagagacagggcctcactggagtgcagtggcacagtctcgcctcactgccacctccacctcctgggctgaagatattctcccaccttagcctcctgagtagctgaaatgataggcactagtcaccatgcccggcttattctttatttttatttttgtagagactgggttttgctatgttgctcaggctggtcttgaactcctggcctccagcgatccttccacctaggcctcccaaagtgctgggattacaggcatgaaaagcaaactcctgtgccttaaaagtccttttttgttgctgaaaagcagatgcttactgaagtagttagaggagaactgatctgcctagaatttgatctaaaatattctaccaaaaaagagggggtggagtgagaggtagaggaactaagaatggcaaaataccaataattgttcaagctgggtcaggcctccgtctgcatatctaagacctcatgatccagtcttctagaacttccaggtggtacaaggaaaggagtagttttaaggaaacaagagattctcaatttccacacaggccacagagtctgataattaacagcacaaaatcaggagccagcctgttcaaatcaccccaccggctgtgtgacctcaggctagttccttaacatctctgtggttcagtttcctcgtcttgtaaaataggaataagagcaattctgcctcacggggtggttgtgaggattcaatgagaaacccttagaacaggacctgcccagtgggatgcgtgtcacacaactgctagctggaattatacgtgtcctgcctaaaaggacagcccaagaatgctctgttagaagagcattcccacttcccattgtccacctgtccccttcacaagtgtgcttcctgcactttacagaagagaacagtgcagtcccccacccatcctgaatctttttttttttttttttgagacagggtctcgatctgtgggccaggctggagtgcagtggtgcgatctcggctcactgcaatctctgcctcccaggtttaagctaagattctcctgcctcaacctcccaagtagctgggattacaggcgctcaccaccaggcctagctaacttttgtattttttgtagagacagggttttgccatattggccaggctggtctcgaactcctcacctcaagtgatctgcccgcctcagcctcccaaagtgctgggattacaggcatgagccaccacacccagccccatcctgaatcttaacacatggcacagtgccctggagtgtgaaacctctgaggacataaacggacgatttcaaatattgctatcgctgtgaacacaacgaatgctgaatcattattgagtaataaatcaaaaggagggcctaatagaattggctgctcacagataatataaaataaatttgtcgtgtctcactgtgtgccttccctatgactcagaaggggttcagagcacggagtgatgttactccacctgcactctgtccactcccacccacttattaatatcatgtaagccaggagctgtggctcaagtctgtaatctcagcactttgggaggccaaggcgggaggaaggcttgagcccaggagtttgagaccagcctggacaacatagcgagatcttgtgtctacaaaaaataaaaaattagccaggcatggtagtgtgcacctgtagtcccagctactcaggaggctgacacaggaggactactcgagcccaaagatggaggctacagtaagctgtgatcacaccactggactccagcctcggtgacaggataataccttatctcaaaaataaataaatatcatatctacaaaaatgaaagataggattagaattgatgctgaaccctgtctcattctaacaatatatgtgaaatattgggtgggggtaagctcactgagtgatgccattacaatggccattacaatttacttctgtttaatatttttatcaattgtgcacaaacaattcttgcaatgatatcttactccattaaaaaaaccacttagagtcttagagtctcaggaatttctaaaacttcttatatcttttataagaaggctgttttgtcctgggaggtttcacaccccagggcaacatgccacgtgttgagatttgggatgagtggagactgcactgttattattttattttattttattttattttattttattttttgagacagaatctcgctctgttgcccaggctggagtgcagtggcttgatctcggctcgctgcaacctctgcctcctgggttcaagcgattcttctgcctcagcctcccgagtagctgggattataaaaattctgaaatcttagtcatagatgtgtatgtttgtggcagagaagtgtgatggcgattgtgacacaggctgccaatggtcacgtcttgactctgggcatgaccatggcacttgctttggccaatgggacattggccaccatgataccaagtagagccttggaaagtgcttgcacactggggcttgtgtgctcttaggaatcttgagagcaccttgggaagaagccttggctcacctgctggaagatgagaccaagtagagcagagacaagaattcccagctgagggccccccaaaccaaccagcttgacaactgccagatgtgtaaaatcaccctagattacccggccttggctgagcctccaacagactgcagagatcaaccaagctggcccaggctgggagaacagctcagcagcccccagaatcatgagaaagaataaatacttggccgggcatggtggctcacacctgtaatcccagcactttgggaggctgaggcgggcagatcacctgaagtcaggagatcgagaccagcctggctaacatggtgaaacccccatctcttctaaaaatacaaagaattagccgggcatggtggcacatgcctgtaattccagctacttgggaagctgagacagaagaatcacttgaacccaggaggcggaggttgcaatgagccgagatcacaccattgcactccagcctgggcaacagagcgagactccatgtcaataaataaataaataaataaataaataaataaaaataaacacttgttttaatgcactcagccactaagccttgggttgtttgttaggcaccaaaagccagctgatacagtgactttaacaaaagacttccatgcattcaaatgtgttacattaggttaaattctgttagaactaaaaagcattagaaaatcagttcagaaaggcaaggatttgttttcttattctctcccctattgtatccggagtgtttagaatagtgcctggaatacagaaggtatttttgaatgttttggatatttgttgaatgaatgaatgtaagttgaaggagaaaaaggaatgatgtatttatcctgtatttttcagtggacaatgatgtgtaccactgtgtgctatgtatctgttgaatacatttaaaagaggagcataagtcaagtaatggtttcattttgaaataccaatattatgttgataattgtggaaactaaatgatggatatatgctggctcactatcctagtttactttggatatgtttaaatttttccctaataaaaatgttcttaaggccatgagcagtggctcacgcctgtaattctagcactttgggagaccgagttgggcggatcacttgaggtcaggagttcgaaaccagcctggccaacatggtgaaaccccctctctactaaaaataccaaaaaaattagccaagcatggtggcgggcgtctgtagtcccagctacttgggaggctgaggcaggagaattgcttgaacccaggaggcggaggttgcagtgagctgagatcgtgccactgcactccagcctgggtgacagagtgagactccatctcaaaaaaaaaaaaaaaaaaaggttcttaaaagtcaaaagttaccatttgttagaaattataagttttatgattatttcaggtgaaaaactagacatgtatgcttctattaattccaaaattcaaaaactttagaagtcagaatagtggttacctcttggggttgggaacctggattttttttttttcttgaatttgggacagttcacacaggtttgttctcttggtgaaaactgatcaagctgttagcttatgatatgtacatatttttaaatatctgtattatatttcaataataaattttttaaattaaaaatcgggtgagaggaaactggtacgatggctcacacctgtcatcctagtattttgagaggccgaggcaggaggattgcttgagcccaagagcccgagaccagcctgggcaaaatatcaaaaccctgtctctataaaaaatattttaaaaattagcgggggatggtggtgcaagcctgccgtttcagctactcaggaggctgaggcaggagaatcgcttgagcccaggagttccaggctgcagtaagctatgattgcaccactacactccagcctaggcaacagagcaagaccccatcttaaaaaaaatcaggtgagaggatgcatggcttttcaaacttctttcataggcaagcaaaggtgttggaaaaccattcatgcacccacctctgaaacaaggctctcaaactgactgcccaaggggtcaggcagatgtaaataagcgaggtaggatagatggggaccaaaaagaaccagagaggggatgagactcctaatgacaatactgttgctcatatctcaatgacagctgttatgtgggaatcagaccctgggccaccaggtgtactcagtcattttacaaataccaactgccgctgggcacggtggctcacgcctgtaatcccagcactttggaaggctgaggtgggcggatcacgtggtcaggagatcgagaccatcctggccaacatggtgaaaccccatctctactaaaaatacaaaaattagctgggcttggtggcgcatgcctgtaatcccagctactctggaggctgaggcaggagaatagcttgaaccagactcagaggttgcagtgagccgagatcatgccactgcactccagcctggtgacagagcaagactccatctaaaaaaaaaataccaactgcatgcccaccatctgtgattttctagctatcatgatcccaggtgtgtaactgaacctttctgaacttcaatttcttcatctgttaaatgggtataaccacaatccctacctcatagggctattataaggattaaatgaattaatgatatttatacattaatgaatatatataaggctgagtcccccagttgccacttccgatactcacggcaaagttcttcactcctccaggggtgcactgtggctccagcagcctggcatgcagcagcataggtggccagtgcgtcacacagtggcccagactggcctggcagcaggcagcggtcatagacacagtcgcgcacggcaccctgggggtccagcttgctatggcactcccggaagggccccttggggtcggcaaggattccacactcattcttgctctgcagctgctgggccaccagggagtccagcttgggacagtcacccggttcagttgctccacagccgggcctcgtctcttcttgccagctgttcccaaaggccagtgcattggcagcttgacccccaccccgcagagccaggtcatcagctgggtccccgttgaagttcccacagagtccacacagggcctcagcatagctgctgggcaccttggcagtcactcgtgcattccagtcataagtgacagtcaggccaaagtccgtgcgcacgacggcatccctgccctgtcggaacacctgcacctgcccatctgctgcttggaagggcagatactgaaggacgtcatccacctgggtggagatgcaagagggccacctggtcagggtattcacagttctgtggcccacccttcaattcactcacctccagctaccctgacctccttgctattctcttggacatattacgctcagtcccacctcgaggcctttgcacttgctgttccctctgcctggctcaccattcacccctcttcattcctaaagcaccagcttaaatccaaatccctcacccatggccttcaaaacctacatgatctgtctatctccccattacctccctcgcctcacctcttctcactgtccctctcactcaggctgctgcaaccatactagctttcttttctttttttttttggacagggtctcactctgttgcccaggctggagtgcagtggcacaatcttggctcactacaacctctgcctcctgggttcaagcgattctctctcagcctccctagtagctgggattacaggtgtgagccactgcacctggctaatttttttttctatttttagtagagagggggtttcaccatgttggccaggatggtctcaaacctcagatgatccactcgcctcagcctcccaaaatgctgggattacaggcgtgagccacggtgcccagccactagcttcctttttaaaatagagacaggggtctcactctgtcacccaggccagaatggagtggcacgatcatagctcacttcctagcacttcaggaagctgaggcgggagggtcacttgagcccaggagttggagaccggcctgggcaacttagtgcgactccgttctgcacaaaaaggaaaaaggaaaacgaaaaaaataaaatcttctaacaggcctcccccaccctcaggcccatccagaactccaagtcttcagagggtatttcctgctccgtcacccagccctgggcgccacgtcgctcaccagcacttgcccggggtactcccggcgcacggccaccttcaccccgcgggcctccacccgcacggcgcgcgtgtagctcacagtctggctgccccgatgctcgttttccaccagcacccggaaggcaggcagcgctgcgttctggccgcatgagccgaccagcaggtacgtgcaggtgcccatgaagtcgaagcgccggccgtcgaagctcacatagtgtgggtccccggacccctggcaggtcccgaagcgatcggggtagcagcccaggaggccgttctggacgctgcagcgctcacccgccgggcagctctgcttgtcgcggcaggtgacctgatgggtggcgccgttgcaggtgcagcgcctttggcacaactcgtccgcccacacttcctggcccggagcgagctggagaccctggaaggtgcagccacacgacgaggccggcacgcaggcgccgccgctggccacgaagcctgggaggcacacgcagccctccacgcaggggcgcccggagcagttggacggcgccgcagccccgttgcaggaggtcgggcaagcagggccgcagagctcatagcggctgttggcagggcaggacagggctgcggggagatcagagagggtggatcaggcccgcgtagcaggggccgtcgaagagcgccctgtcggggacggcgcccaggaattccatccccaaaccctgctcctctctcagagctcgccatctcagataatggcactgccattcttctgggtgctcctgcgccacaccccagcgacgcagttaatctccaccccgccaaccccctaacgctcactggacaaccaatctgtcagcaagtcctgtgagctccatattcaaaatctacccagattggccgggagtggtggcgcaggcctgtaatccgagctactcaagaggctgaggcaggagaatcgcttgaacccggaaggcggaggttgcagtgagctgagaccacactactgcactccagcccgggcgcagagcaagactttgtctcaaaaaaaaaaaaaaaaatccacccagttacagaatctgcctctgatcctatccaccgcagcagcctcctgcctgggctccctcctgcccccacagcctgttcctcacaccaggccgaggaatctgggaacatctgggtcagatcaggtccctccccatctcagagcactactgtggcttcctctcactcagggtaaacgccagagtcctccccatgcctcaggaggccctgtgccatctgttcctctcacctctcagccctcacctcttctccctctccctcgggctcactctgccccagccccagctgcctcctcctcccgggtcctcaccctcccacctcagggcctttgcattggctgttccctctgccttccctttccccagaaagcccactggggcccaggtggcctgggttcagatcccagatctctccttctcggccactgactccaatctccccgtgcctcagtttccccatcagtaagatgggataatgtagtcgagacctcacagggttgttgtgaggattaaatgagttgatctatggggaaacattctgtggacatcactgttagttagtacttagctgactccattgcctgaccctggtctcagctccaatgttacctgcccagaaaggccttccctgatcaccctcttcacgagcctcacagtcactgtcattgaatgaacttgtttctttgcctctctgaagatacttcctagttcatctgctcactgtctgtgtccctcccctgccgctaagagagaagttctgcgggagtggggacctgatctgtctcaatcactgctgagtccccagcaccaaggacagggcctggtacgcagcaggtgctcaggaaatactgcagaagtgaaagggagaataaatgaactctctgattcctattttgcgccaggcatggggttgggggggtgcttactgggcagtggggacacagaactggccaagacaaacacctagtggcctctatgtctgccctgtacttactccccctccctctgggcctgggcctggatgcctcttcctccctcctacctgtcctttctgcctctgggacatgtctctaggagcctcactcacaagggcaggaatagatttatgctggtcttcactgtgtcttcaatatcattagcatgcacagggggcaggcaggggttcaaggaatgcttgtggaatgaatgagtgaacgattaagcagacggacacctggctaaagagcctggactttatctagagggcaatgggagtcatgggagggctataggcaaaggaagagacgtcacgtctctgtgttgggattctgcagacaagaattcccgtcctgccaagcctttgagcatgctgttctctgggcctgcaactcacttcctcctctttctcttggcaacttccagcccctcttatgggtttcaaattggacatctttctctagaaaaccctccctgaccacccctgctccccaggctgggccaggaacctcctctggtttcccatagccccactgacttcctccatcctggccccaacccctctgcctgtgtcccccgcaatcccagccctgactcatctgcctgtctctctcccatcctggccccaacccatccgagtgggcctccccatcctgcctggacccctccagactgtcaatgtctagtgaaacgtctctccaaccttaggctcattgtggacagagctggctgtcttggccatcactaggcccctggcattgcccagcaccaggctgaaccataataacttctcagatattaagcagatgctagggatctcctgcccctcactgtatgctcccagcccccacccagggcatcactcacggcagttggctggtgatctccagtccccaaccgagatgccaagctccagacaggcctgggcataggcgctgaggccacggcacaggctgagccgctccccaccgaccacacacaggtcatatacacactgctccaggaagggcctggggtccagggtgtcatggcagacagcgaaggggccatcgagcttggtcagcatgccacagagtcggtcgccctcatagtgttgggcctggcctggggtgcaggcgggacagttgttctggcagccatcctcacacaggtagtccccatcatccagcttccagctacttgcgaactccacagcgtcaggagccagagccccgtcaggcgtgaggaagtcgtctgctgggtcaccattatagttgccacacagcccgcacacctggtcttggaagcgtgcaggcaggctgagtgccagctggcagtcccagtcataagtgaccaccagcccaaagaccagctccaccacggcccgtggtccgctctggtacacacgcaggcgaccctcactcagggagactggcaggcgcgagcgctggttgtcaacctgcagagtgggtgaagaggaggtggtcaggcccctgtgccatctggcctccagccctcattaaagtactttttaattaaaagttttaaataggagaatatagaaaaagagtatgtgctcaaacgtcactgactcaagccttccctgactgccctattttatgattttattttatggtttgtttgttttgttttgttttatagagatgaggtcttgctatgttgcccaggctgatctcaactcctggcctcaagcaatcctcctgcctcagcctcccaaagtgctagaattacaggcatgacccatgggacccagcctacacccctttttaaatggcagccttgggccgggcgcagtgactcacacctgtaatcccagcactttggaaggctgaggcgggtggatcactttatgtcaggagtttgagaccagcctggtcaacatggtgaaaccctgtctctactaaaaataaaaaaattagctgggtgtggtggggcacgcctgtaatcccagctactcagttggctggggcaggagaattgctttaacccaggaggtggaggctgcagtgagccaagatcgtgccaaacagagtgagactctgtctaaaaaaaaaaaaaaggcagcctctccctattccatagcctccttccctgctttccttttttttctatagcatctggccttctgaaatataattcacaaattgaccatgtttatcatctgtcttactccatcagaatggcagctccacaaagacaagggtttgggtctgctttgatcactgctttatccccagtgcatagaacagggcctggtagaatcccaggcactcactaagtgaattaagtcactgctgcatttaataaacattcactgggcactcactctgtgcctggccttgagctgggagatcctgggaatacgaaggtggcggagacagccccaagccctaccctcatggggctcccagtccattgggagaaacagacacatcaccagacagtgagagctcagaggggtcagggcagagatgggagaagcacaggcagaaaagtcaaggccaggatcagaaaggcccaggcagaggggtcaaggatgggataggggaggtacaggctgagggttcagagctgggatagtggggagataggaggctgtgaaaacctagaaaaatggccagatctaaccttgctggtcagggatgttgaaatcttaacacccaacatgatggtattaagagtggggggaggcctttgggaggtgattaggtcatgagggtggcaccctcatgaatgggattagtgcccttatgacagaggcctcagagagctctcagatccgctttccaccgtgtgaggatacaaggagaagtaggccatctgcaacctggaagagcaccctcacctgaacctggcagtgctggtgacctcatcttggacttccagcctccagaacacagagacgaggttgtgttgtttataagcctcccaggctctggagaagcctgaagtctgactaagaaccaggagataagaactatgtctctctgtgccctggggcatcttttttttgagatggaatcttgctctgtcaccaaggctgggctgcattggcacgatctcggttcactgcaacctctgtctcccaggttcaagtgattctcccacctgggattacaggtgcctgctaccacgtccagctaatttttgtatttttagtagagatagggtttcaccatgttggccagactggtcttgaactcctgacctcaagtgatctgcccacccctgctcagcctcccaaagtgctgggattacaggcatgagccaccgtacccagccttttttttttttaattaataaaaaaattttttaaattagatatgggggtctcactatgttgtccaggctggtctggagctcatggctcaagcaatcctcccacctcggcctcccaaagtgctgggattataggtgtgagccaccgcacccagcctgggcatctctttcttactctttccttacacattctctgagctgtgccagagctgagacttgaagtggagaagtcttagccaagaggatggaatatgataaaaggagcaacaggagagaggacagcatgagcaatggcccagaaggaagacagagcattcactcattccggctcccagcaaagcttctgtgagtcccactgtgtggcctgctctgtgccagctggtgctttagacactgcagtgatggagacaggccatggccccatgctcagagctctcagtccagcatggctgctcaaatctgtttctcccctaagtccagtgatctccattttaatttttctatttttttatttatgtatttttttgagacagttttgctctgtcacccagcctggagtgtagtggcagcatcatagctcactgcagcctcgacctcctgggctcaagccatcttcctgcctcagcctcccaagtagctgggaccataggcaggcgccaccacacccagctattttttttttttttttttggtagagatagggtctccctatgttgcccaggctggtctcaaatttctgggctcaagtaatcttccagcttcagcctcccaaagtactgggatcacaggcgtaagctaccatgcccagccaatctccatttttaaatgacacaaataatattcgttcattacagaaaactgaaaatgcacaggagcaaaaatgagaaaagaaaatcaccctgtaggcagacacatacaaatgtatagatcctgttgagttttttcctacctttagatatatttacacttaaaaaaaaaaagaccatgctgaagtcactatttcattaactcctctcctaacaatgtcttgtgagtatcctactatgattctgacagtagctctgcacctttgtcaagtcactgacctctgtgaggatctgacggaaaaaaaaatgaaaggccgggtgcggtggctcatgcctgtaatcccaacactttgggaagccgagttgggcggatcacaaggtcaggagatcaagaccatcctggctaacacaatgaaaccccagctctactaaaaatacaaaaaattagccgggcgtggtggcatgtgcctgtagtcccagctactcgggaagctgaggcaggagaatcgtttgaacccaggaggcggaggttgcagtgagccgagatcacgtcactgtactccagcctgggcaacagagcgagactccgtctcaaaaaaaataaaaagtagttttcagagagaggtataaaattctgtatataatttcaagggatctgaagtccgcctgaacttgtgctcaacccctccagggctgaagaacacctcctttcaccaactgattattaatcgcagagatctacctgcacactcacaaaatcagggaggtacaagaatatttatttcaggtcagatacaggggcttacgcctctaatcccagaactttgggaggccaaggtgggaggatcacttgagaccaggagttcgagactagcctgggcaacatagcaagaccttatctctactaaaaataaaaatacttagcccagtatagtggcatgagactgtagtcccagctacttggaaggccaaggctggaggattgcttgagcccaggagtttgaggttgaagtgagctataatcacaccactgcacttcagcctgggcaacagggcaagaccttgtctcaaaaaaaaaaaaatcaaaaaaatattcattgcagtattgtttgtaatagtgaacaatgtgtccatccacaggggactggttgaatgaaccatggtgttcatatccatataaagaattgtgcagatgttaaaaaaaaatagaggctgatagagaaactgttgatagagaaactgtttcagaatgtattgctaaatgcaaaaagcaaagtagagaacacaacatatatatacacatatacatgtatatatgtgtgtgtatatatgtatatatatatatatacacatatatactctctctctctatatatatatatattttatttatttatttttttttttgagacagagtcttactctgtcacccaggctggagtgcagtggtgcaatcttggctcactacaacctctgcctcctaggttcaagcgattctcctgcctcagcctcccgtgtagctggaattacaggcatgcgccaccacgcccagctaatttttgtactcttactaaagatggggtttcaccatgttgaccaggctggtctctaactcctgacctcaagtgatccacccacctaggcctcccaaagtgctgggattataggcatgagccactgcgcctggccctgaagttattgaacaggcaaaactaatctatgctggaaaaaaaaaatcagaattgtgatcatctccaggagtaggttggggactgtttggtaaggcacatgagggaattttcccaggtgataaaaatattctgtatcttaatgggcaatttggttacacatttgccaaaggtgaactatacagttaagatttgtgatttttgttatatataaatttcacctccaaaatcagccaaaagaagtgtgaaaatattatattctagttaatgacatggtgaagtcttttgggtgatatgtactcatgtctggaactttgaagtgcataaaaaataagagagattgtggaatggacagagggatgaaccgatggatcagtgtgtgatcaatcaagaagagtacagtgtttagaatctagatgattggcacctgtaatctcagcactttgggaggctgaggcaggccgatcagttgaggccaggagttccagaccagcctggccaacatggtgaaacccctctctacaaaaatacaaaaattagctgggcatggcggcacatgcctgtcatcccagctactcgggaggctgaggcaggagaatcgcttgaacctgatcctgccgctgcactccatcctgggtgacacagcaagactctatctcaaaaaaaaaaaaaaaaaagaaagaaagaaagaaagaaaactctaggcgattggcatatgagcattcactgtataagaatttcaactttggacattttaatattttcataataacatggcgagaaaaaggaagtaattgctctaggctgctgttattcatatgaactgaatagaaatgcatttaccagagtcaggacagctgagggattaagaacaaggactccagagccagcatgcctgtgcccttagctccacctcttactagctctgagccctggggaagtcactagcctatctcaacctcagtttcccaatctgaacatgttcataataataatgcctcctgcactgagtttgtgagcattaaattcgttaagatgagaaaagtgctaagaaacatatctggtgcatagcaggtgctcattaaatttagttatttggtcaacgtaaatcccccattgctggataattttttgtttgtttgtttttgttttatgctattataaaccatgttggcatgttaccccccagtctctgtctctgaatatcctttaaatttctagacgtgggatggctggagggcagggttctaaggtcctgctactgattttcaaatccgcctccccaccctccaactccatggcccacttccctgcaccctggtttgaggtcggccattgggctttgcctccgccttcggacccgcagctcatggatgttaaccccccaaagcccccaggtactcaccaggacgaagccaacttcaccgcgggtcagcgacacagagtggctgtaggcgcgcacagtgacgaggcccacgtaggagacgcggcggctgccccggtgctcgttcttggcctccacgctgaaggcgggcagggtgtcgtcctcgctgcacagctccaccatcgtgtacgaacaggtgcccatcatgtcgtagcgacggccgtcgaaggtggtgtaatgggggtcgccctgggcgcggcagacagcggtggactccgccacacacccggccttcccgcctaccacctggcagcgctgcccggctgcgcactgcatgccttcgcaggagggctccactggggacagtacagctggggagggaagggaacggtgaaaagagagaatcagaagtgtccgcggggttgtaatcccagcacattgggaggccaaggtgaggggggcggatcacttgaggtcaggagttcgagaccagcctgcccaacatagtgaaaccccatctccattaaaaacacaaaaattagcagagcatggtggcacatgcctgtaatcccagctacttgggaggctgaggcaggagagtctcttgaccccaggaggcgaaggttgcagtgagctgagatggcaccactgcactccagcctgggtgacaaagtgagactctgtctcacaaagaaaaaaagaagaaagaagaggaagaagaagaagaaagaagaaagaagaagaagaagaagaagaagaagaagaagaagaagaagagggaagggggaggaggaggaagaggaggaggaggaggagggaagaagaaggaagaaggaagaaaccgcctcaggcctcagagggaggcatcctggagcccaccttgccggggaagcttgagcaattcgctcacaactgcccatttttgcccatttttgcccattttaaaggtggggaaaccgaggtctggaaccccacagggagagagttgctcaggcctctctgagagccccatgttttctgattctccagtttaacacagggcagcctagaagaagggaaggcagtaaataagaaaaggcagaaacggtcattaaaatgttaatttgtgtttttctctcccccttttcccctcttccctaccttccctccagggtcaaaaagagctaagggatttttttaaggacagaaaatggaagacagccttcagcaggatgaaaaggactatggagtcaggccgcctaggtaggaatcctggctcaaccaactggctctgagacactgggcaagtggttttaaactccctctgcctcagtttcctcatttgtaacatgggggtgataataatacctccttcgtagggatcttggtggggggtgttaggattaaataagctaaaactcgagaaagctttagaactgaacctacgtgttaagtggagtgttacccattataattaatcacccaccgctccctcattctatttctcaagcccaaagtggctccttgaagttgggtggcttccatgccttggaggggaggggaggggcatttttgccaggtccaggaatgccagagtcttagcgtggcagggactacatgggaagaaacagctttcctccatctgcctcccagtcctcaaaagtttttgcagctgggtgtggtggctcaggcctgtaattccagccctttgagaggctgaggcaggaggatcgcttgagcccaggaatttgagaccagcctgggcaacatggaaagaccctatctctacaaaatataaattaaaaattagctgggtgtggtggtgcatgcctatagtctcagctacttgggaggctgagggaggattgctttagtccaagagttcgaggctacggtgagctgtgatcacaccaccgcactccagcccgagtgacagagtgacaccctgtctctaaaacaaagttttgagggagaaacagttatccccattttacagatgtggaaactgaagcccagagagatgaagtcacttgtccaagatcacacagcagagctgggatttgaaccctgggaccctgcactacactgacagcgtctcatgggctgagcctgaggtcacacaaactgccaggtcatatacattaactgtgtcaaaaacacgtgaaacacctagaaagattgcaagatactcccctccccaacgcgtagtcatcttattatcatacatttagatctcctaagtttgggtatcaacattcctacatgaggtgtggagagtggcttagcaactggtgtggctatgtcagttgctaaaatatcaaaatatttccaaactggttggtgagaagctgctgacctgactgtcccccacaaccccaaagatccctccttctcagcaccctggctctcccctagggccctttccagaacaaaccaacagacaggggctgatgccagcatgatgggggcttcaggaccctgtcacagtgctttggctgctgtctcttctgactggtagtgccccagctctccctggttgctaaatatttagaatattgtttctgggcggatgggaggggctgagaagacttgaggaaggatgtcgcggagaagagaagtgaggggaggacaatcaggatcccgaaagccacagaggagtaggtgggtggaaaagcggtcaccaggtggacaggaccaggggacatttccattacttactccggccgcaatcagcagctgttgcgtagcctatagccttggccagcccgaaggtgagcagtcccaagttggtggtggcctcggccgtgtggatcatgtcagctgtgccgagctccacttcagcatacgagaactcactgcctggcacagcctcccaggtgagcttggcccccactgcatgcccatctatggtcagcccgctgatagccttcgtctgtgccactaccagggccacgccctcacagcctggtacactcttgaccacataggctgggcagtaggccgccacatctgggatcaggaccaggtaggggtcataagtcacttcattccttatggcacctgtgccaaacaacaggacctggatgcccacatttgcagacaggtagagtggccaggatggccggacctcaaactctaccacatcacctgcctggagcccacgggagccagtgatacccccatggttgtaggtcagctttgtggcctggctggccacaacgaaggccaaatcatagcgagattgggaggccagcgtgggtactacatagtgggtgccccaggcagacgtgggtagcagctgctcaaccacatggttgcaggtcgtatgtttctgcgcacagctgtggccagagaggacagccacggggctactagctgtgacctttgaccccgagagatccactgagctctgtagctgggccacattgtagggctgtagagtcactcttaggacatcgcctgctggatagaacttgccattgaatgtcactgaccccttcagcgtgacactgaccgaggcacctgcggcaccggccaccacggcaaactccttgacattcctggctgaggtgccggggggtgtgagcacaaaatactcggtgcctagggcctggatgggccgcagcagtgtcagctccgctgtgtcaggcttggcatttagtgcctgcacagagatggcatagtcagaatggatcaccaccgcatgctggaagatcttgctgcctatcatctcagccttggcactgatgttgaccatgaccgactccccgggcctcactgtgaccttctttgaggtgttgtctgcctggctgaggatggagactgaagcggggctctctgacagactggagataaggaggcgggggtaggccttgctgtaggccagctgatagttctgcaggaaggctgtgaggaattcctctctgccagtgttcttgaggtccactgaagcctcctgggtcaatcctggttgagaaaatacagttgtgggtccacttatccaatcctccccacttttgctctgcacccagaaacatgttgaagtattaacttgggctttcccccaccacccttctctttcctttcttctgattcatgcagctttcgtctacaagccttcctggcttttgtttttcaaaaatctaaacaccttagacagggccctcaaactccaatgctgatggggccaggcaagaaatataaatgtgtgaaacagtcccggaggggcgactgtggaactgaagcactcctataccatctaaagtgggttgttgcttatgcaaatccatcagtgtgatacatcttatcaacagaataaaggacaaaaactatgtgatcacttcaattgatgccagaaaagcatttgataaaatttaacatcctttcgtgataaaaactctcaagaaagtagacacggaaggaacacaccccaacatgatgaaatccatgtacaacagacccacagctggtatcatactgaatggggaaaaactgaaagcctttgctctaagatctggaacacagcaaggatgtccactttcaccactattcttcaacatattattgttagtcctagctaaaccacttagacaatagaaaaaaataaagggcatccaaactggaaaaagggcattcaaattatctttgtttgcagatgatataatcttatatttagaaaaacctgaagacagctgggcttggtagctcacgcctataatcccagcactttaggaggccgaggtgggtggatcacctgaggtcaggagttcaagaccagcctggccaacatggcgaaacccaatctctactaaaaaaaaaccaaacattagctgggtatagttgcacatgcctgtagtcccagctactcgggaggctggggcaagagaatctcttgaacccaggaggtggaggttgcagtgagccaagatcacaccaccacactccagcctggatgacagagcaagactctgtctcaaaaaaaaaaacaactttggctgggtgcagtggctcaagcctgtaatcccaccactttgggaggctgagctgcacagatgaagaggtcaagagattgagaccatcctgaccaacgtggtaaaacctgtctctattaaaaatacaaaaaaataattagcctggcatggtggcagacacctgtaatcccagctactcgggaggttgaggcaggagaatcgcttgaacctgggaggcagagatggtagtgagctgagatggcaccgagctgagatggcaccattgcactccagcctgggcaacgagagcaaaactccatctcaaaaaacaaaaaacaaaaaacaaaacaaaaaaaacagaaaacctaaagacttcatcaagaagctattagaactgataaacaaattcactaaacttgcaggatacaaaatcaacatacaaaaatcagtagcatttctatatgcttacagcaaacaatctgaaaaaaaaaaaggaaagtaatcccatttacaatagccacaaataaaataaaacacctaggaataaacgaaagaaatgaaagatctctacaatgaaaactataaaacagtaatgaaagaaatggaggaggacacacaccaaaaaaaatggaaagatattccatgttcatggattggaagacacaatattgttaaaatgtccatactaaccaaagcaatctaccgattcaatgcaatctctataaaaataccagtgacattcttcacagaaatagaagactaatcccaaaatttgtgtggaaacacaaaatacccagaatagctaacgccatcctgagcataaagaacaaaactggaggaatcacattacctgacttcacattatactacaaaactataataaccaaaacagtgtggtactggcataaaaacaaacacatggaccagtggaacagaacatagaacccagaaacaaatccacccacctacagtgaattcatttttgacaaagatcccaagaacatacattgcatttattgaagataaatggtactgggaaaactggatatccatatgcaaagagtgaaactagacccctatctctcaccacatacaaaaatcaaatcagaatggattaaagacttaaatctaagacctcagactacgaaactactacaagaagacatttgggaaactctccagttcattagtctgggcaaaaatttattaagtaatacatcaaaagcacaggcaaccaaagaaaaatggacaaatgggatcacatcaacctaaaaagcttctgctcagcaaaggaaacaatccacaaagtgaagacacaactgacagaataagagaaaatatatacaacccatcttagctaaagcaattagacaagagaaagaaataaaggcatccaaactggaaaaaaaaaaaaaagaagtcaaattatccttgtttgcagatgatataatctgatatttaaaaaaaacctaaagacgccatcaaaaagctattagaactgataaacaaattcactaaatttgcaggatacaaaatcaacatacaaaaatcagtagcatttctagatggtactgacaagggattaataaccagaatataaaaggagctcaaacaactcaataggaaaaaaatcaaataatctgatttgtgtgtgtgtgtgtgtgtgtgtgtgtgtgtatgtgtgtgtgtttgagatggggtcttactctgtcaccccaggccggactgcagtggcacgatctcagctaactgcaacctccgcctcctgggttcaagtgattctcttgcctcagccttccaagtagctgggattacaggcatgcgccaccatgctcggctaatttttgtacttttagtagagacagggtttccccatgctggccaggttggtctcgaactcctgacctcaagtgatccgcctgcctcggcctcccaaagtgctgggattagagacgtgagccaccacgcccggattaatctgattttaaaatgggcaaaagatctgaatagacatttctcaaagaagacatacacatggccagcaggtatatcaaaaaatgctcaacatcactaatcatcagagaaacacaaattaaaaccacagtgagatatcatctcactcgagttaaaatggcttttatcctaatgaaaggcagtaatgaatgctgctgagcatgtggagaaaagggaaccctgttaccctgttggtgggaatgtaaatcagtacaatcactatcgataataatatgaaggtttctcagaaaactaaaactagaactactgtatgatccagcaattcctttccttccaagtcaggaagtcagtatatgtaagagacatctgctctcccatgtttattgcagcactattcctaatagccaagatacggaatcaacctaagtgtccatcaacagatgagtggataaaggaaatttggtacatacaaacaatggagaattatccaccataaaaaagaatgagatcacccggcacagtggctcacacctataatcccagcactttgggaggccaaggcaggtggatcacttgaggtcaggagttcaagacgagcctggccaacatggtgaaaccctgtctctaccaaaactacaaaaattagccaggaatggtggcatgtacctgtaatcccagctactcgggaggctgaggcacgagaatcacttgaacctgggaggcggaggttgcagtgagccaagatcgcgccactgtactccagcctgggcaacagagtgagactcggtctcaaaaaaaaaaaaaaaaaaggaatgagatcctgtcatttgcaacaacatggatggaactggaggacatgatgttaagtgaaataagccagtatagaaagacaaatttcacatgttctcactcatagatgggaatttaaaatttttaactgatgaactcatagaaatagagagtaaaatgatggttacgatgattaccacaggctggaaagtgtagcggggactgggggataagtagatatggttaatgggtacaaaaatacagttaaacagttagataaaatagataaaatctagtatttggtagcagaacaggatgactattgttgacgataatttatggtatattttaaaataactgagagtggaattggaatgttcctaacacaaagaaatgacaaatgcttgaagtgagggatgccctagttaccctgattttatcattacacactgtatgcctgtatcaaaatatcacaggtaccccataaatgcaaacccataaaaattaaaaattttaaaaatatataaactagtaaaaaaaaaaaaagtggattgttggtactagctttcacctgttataatgaaagaatgtgagcttttttaaattgtaagaccttcctgtttttctttttttttttcttctgagatggagtctcgctctgtcacccaggctggagtgcagtggcacgatctcggctcaccacaacctctgcctctcaggttcgagtgattctaccacctcagcctcccgagtactgggactacaggtgtgcgccaccaggcacagttaacttttgtattttttcttttttttcttttgaaatggagtctcactctgttacccaggctggagtgcagtggcgcgatcctgggtcactgcaacctctgcctcccggtttccacgcccagctaatttctgtatttttagtagagatggggtttcaccctgttggccaggctggtctcaaattcctgacctcaggtgatccacctgcctcggtctcccaaagtgctgggattacaggcgtaagccaccacgcctggccgttctttctgtttttaaagagaatgtggctatctgaattttcatgtgaaatctccaacccacaattgttttaagcactttggggctcaaggtggatgtactctgctgccagtgtatgatttccatctttttacaaactggagtgcagtggcttaaacacaacacactgcagcctcaacctcctgggctcaagggatcctcctgtctcagcttctggtatagctgggaccacaggcacgcactgtgtgcctggctcattttttaatttttttctagaggcagggtctcactttgttgcccaagctggtcttgaactcctgggctcaagtgatcctcctgcatcagcctcccgaagtgctgggattacagacgtgaccaactgtacccagctggtttttgtcttaataggacttgtgggggccaggcgcggtggctcttgcctgtaatcccagcactttgggaagccaacgcgggtggatcacttgaggtcgggagttcatgagcagactgaccaacgtggtgaaattccatctctactaaaaatgcaaaattagccggacatggtggcatggggcgcctgtaatcccagctactagggaggctgaggcaggagaatcgcttgaacccaggaggtggaggttgcaattagctgagatcacaccattgcactccagtctaggcaacaagagtgaaactccatctcaaataataataataataataataataataataataataatgggacttgggggtttgtgaaaaggggataaagagaagaaggggattatggaagggtgaatgaattgtctcctagaaatagatggcagtgggggcttctgaccacccccaactaggaagagcgtccctggggctgaggagagagaggtctaaggaatcttgaagagagtgtgggggctatggaatgaccaccttccatataaagggggctttgaaggatatcccagggggccaggggatcaggaacaatggacatttcaaaagtaacctagatggatgctgactggtgacgagagggtcctcatatcccatcctccccccagtactttggctttatccaaaattttagttctggacacatccctgggagaagtggggacaacaccctccaagaatgactttcgtgaaattttccatcaacttagcagaatgaggctcagagtcaaaaccttagttgagttgcagaaaaccaagaaagttcttgcacacttgagtttggggactaaggtttttgcctgtgctcccatccagaaaagggtgagaattggtgaattctaccacatccccctgcagagcctaagggcctctctcctgtctcagctagcctggggtgacatgtggaggaggcacacatggaaggcgtggacccacgcagagttccccagattggaacaaggacatggagagggtcttggtctgacttaccccacaggagggttgctccagcccagagtatccaccagctccatagggcacccatggctgcagtaggaaaagagaaaggatcatagaaggctgatccaccgcctctgctggagactgtcctgggcagaagggcccactctcatgacaagggccacctgggaccatgaaggctgaggtggggaaagaagtcgggcagattgggccagggggtatggatccaaggaccagtgtgtgtgtataggggaggctggctgtccagcgggtctggaggtgggttggggagggcagaagccagggacggggtggagagttggctgtcttgtgggtctaggggtaggatgaggaggcctacagtcaggggcaagagtaggggacctgctgtcccacttccaaaggggaccccagcccttctcacctgcaggtccctggagctgcagggccagccctgtggcagggctatatagtggagtttctgggccacaccctgggccacgtgccaggcagatgatgccaacttcctggaggaggctgccatcctcatggccagatgaaatgggaaactgtgaaggcctgggaaggagggacagtgattctggatgcctgggttccaagaagggagtgaggacagctggtggccattccctggaagccttctggagagtttggtcctggaagggtggggtccctgagggagacagctggggagcaggcagatgagcacctgggtccctgggtggaggtggggtagggtgggggtgtgggcagtgagggtgggaggtggcatgtggtcatatttgctggcttagtggctaggttccttcctttggctcctgccaggaacaacagtgagggacccatatccgggtcctggttccttctcagtccccacaggctggggagtccctagccacccacatcctgcttccagacaccactaggggcaggtgtctgggatgggcaggagtctgaggctatggagtgggacacaagacctccaccgcagcccagtggggcgtctgcggtttctcatctgcaaaatgggaacaccaaaaccagcctctctgggcatctttacgtcccagagatgtaaaaaaattctcaaggactgtagagctggggggcagcctcctctggtgtgggcgcaggccaggctgcaggtgggcactgggactgaggcggtgtgtgaagaagggacaatggcctctgtttcctggttccacacagacacccagattctacttctgatcccagacacctgctcctcagtggtgctggaaacaggatataggtggccagggactccccagcctgtgaggactgaggaagagccaggacctgttggttttggagtttttttgtgtgtagggagggtttgctcttagcaggggctagctgaacaggtttaggggactctgtgcctctccatcaccccagaatttgcctgagatgggaggtggaggtctaggttgcacacaaggagcagaagaatgagctgaaagttgggctttctcagctggagtcagctcctctgaggggctggcctgacccatgccctgcctgccttctccctgactcaggatctcattgtttgctgggggagtctcccctgggaccagcagctgcaaagcctgggtgctctcttggaccaacaccctagcagctgctgcccctggggctcctcctctcttatcacagcagcctgggcctctgggaggccagagcgggtggggggcttctctctccctggagctccaaccaatccccacgcccacccaagaaacgttcctggagggaaagataaaggctaagagttgactgggacataaagtcaaccaggagaatgaggtgagtaaataggagactggctaaaagccagagataacaagaaacaagcaggggcaggggacccacaggaagtggaagctttgggaaaaggatgcctgggtccctgaggggtctaaaagttggtggaaggggctgctgggtccctgagacagagaaggactcggaggaggagacgtcgggattcctaggaggaaacagcaattgcaaaccaagatgtgaaaattctctgtctgaggccaggcgcagtggctcagcttataattccagcattttgggaggctgaggcaggaggattgcttaaggccatgagtttgagaccagcctggttcaagaccaacatagtgagaccctgtatctacaaaaaaatacaaaaattagccaggcacggtggtgcacgcttgtagtcccagctacttgggaggctgaggcaggaggatcacttgaggccacaaggtcaagaccagcctgggcaacatagtgagaccctttctctacaaaaaatataaaaataaaccgagtgtggtggcatgcacctgtagtctccaccattcaggaggctaaggtgggaggattgcttgatcctaggagtctgaggctgcagcgagccgtgatcatgccactgcattctggcctggggagaaaaagaaaaaagaaaataaaatcctctgtgtgccatatgcctcttgtaattagaggcactcagagacaaatgggaggtgaagggaaagaatcagggtgagtttcatgggtgtttctggccctcaattctctctaagccttggggtttcccctggttgatcacagaaagaagcttcctgccttcaaaattcatcatcgctctccacagccagagtccccagaaatggggtggttgtggtgggagatctcacaaattaatactctgtatgtgccaatccccttgggtcttctttctcactccttttaaggcccaagtggtgtgtgtgtgggtgtgtgtgtgggtgtgtgtgtgtgtgtgtgtgtatgtgtgtgtgtacacccctgtgctttaccctgtattatatcaattctcaggaaaccctttggtgacccgggaaataaactctggggacacttccttatggtcagagaaatcgcatccatccctccactggcagccttgctctgagcccaaacaagggtatttgtgtacctgagcctttcggcctcttcctgcttatctgcttccgtctccttgcagcatgggcactggctataccatcccagacccctgggcccctctgactagtcttggctttatagactggagcacagtggaagagaatttactctctccagctaaattcaggcttgcgggcaatttctaacttaattcctttacgctctggatcccacaatccgacttccataagcactgaacgttttgttaaactctccaatgacccattatttgccacttgcctctagttccttccctctaacatttgacattcacacttcctctctgcctataataattgaaattctataggagatgttctctgaccataatggaatcagcttgaaatgaataacagaaaaacaggaaaatctccactcacaaggatattgagcaactcacttctaaataatccatgggccaaagaggaagtatcaaaaatacatagaattaaatgaaaatgaaaagaagatatttcaaaatatgtgggatatagctaaagggaaatttatggcattaaatatttacattaggaaagaggaaagttcttaaaccaatattctaagctcttcttacacaataaagtagtaaaagaccaaaacaaacacaacgcagaagaaaggaaataatgaagagcagaaattaataaaactgaacatgagaaaatcaatgaaacgaaagaactacttctttgttgttgttgttgttgctaacaagagcaagtctttgaatttcccaaatgtatttgtggatttgtctattgttgaatagagcattctataaatatcaattagatcctgttgattgatgctgttattcagttctttgatattctcacatattttatcctggtagttctatcaatttggtgagactgacgtttttaattctccaactatatttgtggacttgtctatttcacctttcagctctatcagtttttgcttcatgtacttgaatctctgttgtttggtacatataccttaggattgcaatgtcttggcagaatgatcctttgtttttagcaatgtttttcgctctgaaggaaagtattttcgtattaatatagtacttccttccttttaaaaatttatatttaaaattatatatatatttatttatttatttatctatttattttttagacagagtctcgctctgttgcccaagctggagtgcaagggcatgatctcggctcactgcagcctctgcctcccaggttcacgcaattctcctgcttcagcctcccaagtagctgggattacaggcacctgtgaccacgcctggctaatttttgtatttttggtagatacggggtttcaccatgttgaccaggctggtcttgaactcctgacctcaagtgatctatctgccttggcctcccaaagtgctgggattacaggggtgagccactgcacccagcctaaaatttatatttataataacataaattaataaaattaatatatatttctattcttttattttcaacctacctatgttgttatatttggagtaaagttttttggagacagtatctagttggatcattttttaaatccactctaccaatctctggccttttatttcatgtaaggagatagactatttacatttaaagtagttattgatatgtttggacttaagattaacattttaatattcattttccatttgttccatttctcattcttattttttcttgcattcctgtgagttacatgagcattttttagcattccattttgattcatattattttcgaatacataatttgtagaattttcttagcacttgctctagtactacaatatacatatgtaactgattataatccaacttatgaatattttaccactttgattgaagtgttgaaactttacatccatatagatccttttaccctcccacttatacatatgcgtgtgtgtgtatacacatataactattttaagtattgtctcttcctatagacatcagataatactataatttttgcttcaaccaactacgatttttaaaaactcatgagaagggtaatctgctatagttatcactatttttgtccattctgctgttcttccttcctttctaaagttctgagccttttcctgtaatcatttggactttggagaacttcctttaatcattctctaaaaataattctgctgacggcaaagtcttgtagtcttccttcatctaaaagctttttatttcttcttcataccccgtagatagttttgctgcatataagattctcggctgggcacagtggctcacgcctgtaatcccagcactttggggtgctgaggcgggcagatcacaaggtcaggagttccagaccagcctggccaacatggtgaaaccctgtctctaataaaagtacaaaaattagccgggcatggtggcgggcgcctgtagtcccagctacttgggaggctgaggcaggagaatcactgggaggtggaggttgcagtgagccaaaagcacaccactgcattccagcctggaggacagagcgagactgtctcaaaaaaaaaaaaaaaaagattctcagcagatagttattttctttcagcacttgaagagtattgctccaggctttcttctccatggtttttgataagaaattttttgtcatttgatcagtgttccctatagacaatttataattcctctctagctgcttccaagatagtttcattgtttgcctttgttttcataagttagttatactgtgttttggcatggaatccgtcagatttattctgtttagcttcttgcatctgtaggtttatgtcttttgccaaatttgggaaggtttggtcattattcttcaaatatttttcagccccactttcttttctccttctgttaatctgataatacaaatgttagctattttataattgtcctgcaggttctctgagcccttgttagtcattttctgtttctcttttttaaagttgattgtctctctgttttttggattgggtaatttttattgttctatcttcaagttcacttcttatttcctttgtcatagttgctctgctcttgagcctttccagtgagtttttattttagttattgtatttttcagttttatcattttcatttgattctttaagaacatactttccatttctttggtgagattttcttttctttcccatctttgcaaggaatttctacttgcttggtgaaacatttttatgatggctactttagatctttgtcagataattctaaaatctttcatctcagtgttagattgttgattggcttttctcattcaagttgtgatttttctggttgttcatattatgtatgatttttaaattatatcctggacatttctggtattatgagaggagaccctggatcctatttaactcttccattttagcagtcactgtttttaggttagcatgcaggtcctggcctacttttgtgtgctatgattccaatgacaatttagttttcagagcccttgcattattattccggtctatttcatttgcctggtgctggttgagctcatacccaattcctgttagtaccaccaatggaggttaaaagcattttcttggggcctgcttggtgctgctacgttaggagtaggagacactggcacaaaagggtggagagtacttccctgggctgcgtggtgccagcagggctcttccttcatctctgccatccactagggtggggaaagcacctacctgggtgctttctgccgctggatagggggctggggagatgctggatctagaccacgtcctgtcgttgggtgggaaattgagagatgctgggccactgagatgtttctcgagttctaaggcccttgtcagttttccttctttttatctttcagagtcctcttaagaatgtctgttatgttattccagggtttttagcagagaggagccaggaaaaataaatctatgtcatcttgacagagatgttaccatcatcctggcttgttgtagtctcctaagatagaaatcaagtgagattaccagacacagtattaaagagaaaaaaaaaaaaaagtttgtttccgtttgtgcagaagggaggtcagcaccgtgaaaggaaaagggtaggctgctccccacagggagcaagtcgatctgtcttgtaggggtccagatgccatgatgtgcctgtcatcatgtgttaacaagggatttcttggcgcctgcacaatggttcaacatggtttttcatacattgcatgtaatattggcattttaaatctctacctctgagcatgatttttagcattgaaataaggaaattatcactgtaagttgaaacctaagctgttcctgtggcttcctggggaagtccctaagcccctaaagcaggaacttgtggttaatagcttcttgggcctctgatgctgactggctggaggttaggtatagaacaggaattaaaagaaataaagaatgtgtaagcaaaacttagttgtatgtaagaaaacccaattccccctgaggaagagaaagagctggagtcctttaaaattaactgcctgtttttctatggctagtgagccttatctctccctttcccaggcattgtgaagactctgtttctctagctgtgcagctgtaagatcactagacagataatctcaagtcgtaaaacatgctgttccttgaaaaaaaaatgatataatgcatgtctcaattgaatgactgtctttgtttctcacttctgtgatatgcttccccctgcacagatctcccccagccccacgaaatgcttaaaaggtagcttgactctttgttcagggctcagtcctttggatgttaatctgactgggtcggtgcacctgaataattaaataattcctcctcaaccccacggtctctctgattccttaattatcctgctgcagacaagctacagcttgagtaaggggcttttgttctttttcactaaaccacctcaaaataggaagccagccagctgtctcactcccagccaagagatttcattctccttattctttttttttttttttttttttttagaccaggagaaataactttatttgaataggacccgagacagcatattgggctaaggaggagaggtaaggttccaaaaccgcagtcaaagctcatcaaccaaatggactctacttcccagcaaccttgcagttagtgcaaccaacaaaaggcctgctggggaatgtatttgccactaaatcccccaagtatgccaacattacaaaaaagatagaggtttttcatcataattgaatttccacaaacctccccaatcacaagtattataagtggaagtaaaaaatcacattttacagatctcaaacttgtcttcaacatttagttcatcatcttcaaaaaatagctcccctgcctaattcattagctatatgatctctccaagcagcaacaagatggccaggccatggcaatcctcttcctatttcccctagccactcagggctcaacagcagggtgaggctcaggtggaggtagggggtggggagcacaagggctacattcccccagtacaacgtggcatctgaagcttgatgggagagcagaactggtgggacttgagggaagggtccagggcctgtattcagtcagaatcactgctggaagaggaggaggaagaggaggaatgcttgtcatgcttgtggtacttgtggtgcttttggtgcttgtgcatctttttatgagctttcttcattttcttctgcatcttcttgtccactatcactgctggtccaaccatgccaggagccaagggattcacaggagggattccaggggcaggcggtgggtatggaggagggtagggacccaacggttggcatcctggataccctggctgtggcacaggatgagggggcccacctggggggaaagctggattgccatggggagctcctgggggaggaggacaggggcctgggggaaagggtggattaataggtggtgggtgggcaggattggaacctccagggcacccaatattggggggatatggatttggccctggctgcccggcattgggattccacatgtttaggtgtgtcctccagcctttccaccgccgcctgggcttgctgcgttctccttcgcagtcctcattctccttattcttaaggagcaaaggtctcttctggaactacttcctgctaagcatggacatagtctctacatctatttccaggaggagtagaaatttcttatggcttgctgaaggggctgatacggctctgggctagtggtctctgaaacaggctggaagcctggcaagaccatttacttggcatgaaagcattacagtctgaaagacgtgaattttaccagcaggttaaacaagcatggtttaaaaattaaaaatttaaagattaaaaactttaaatattaaaagaagaaagatagccaataagggcttaagaaagggaggaaccaagttacaagccttacaagggtaaggttcatctgacagcattgtacactaagttgacttcctttatcaaaagagtgtaaccaatttcctgattgtaaattgcctgggtgttaacctctactcgcccagtagtatttatccaagtgcagcaggaggtatggtgactgtacaaacatcttcctgttcagctaataagtaacctagaagtcttgcacaatgattaacttgacatgaaactattgtagtctgaaagacacaaattttaccagcaggttaaagaagcatggtttaaagattaaaagaagaaagatagctaataagggcttaagaaaggaaggaaccaagttatggagggtaaggcccaagttatggagggtaaggcctagcagttgtccaacaccacattagcaagagaattgagggaggtttttagcctttccagggcctgcctcacctggtccactatatgcctagggctattgtgactccaggtaccctgcacccagactaaaaggaagaggttacagtgagatagaaggtacagtggctgggcgcggcggctcacgcctgtaatcccagcactttgggaggccgaggcgggtggatcacaaggtcaggagatcaagaccatcctggctaacacggtgaaacccccatctctaaaatacaaaaaattagccaggcatggtagcatgcacctgtagtcccagctacttaggaggctgaggcaggagaatcccttgaacccaggaggtggaggttgcagtgagccgagatcgtgccactgccctccaacctggacaacagagtgagactccgtttaaaaaaaaaaaaaaggaagagggtacagtgggagcatgattcatgccaggccctcaccatgtcttgagtatgacctgtgcacctaatagggaaatgatcccaaactatcttacccagctggggtaatattttattattatattgtctgctaaattttccccaagttgataatgtattttaaagcctgatttaagtcttcatctattagaaagtttgtcttgagaaaggactgctccaataggtcattttaaaagggctgagctttaagttcccctttggggtggatcttattcttagtaaggcaatagggaggcacttaatccatgatttctgggcttcttggcatagtgtagccaaggttctttttaagggtttgattcattctctcaactttcccagaagattgaggatgccaggcagagtgaagtttgtattggatgctaagactgctagacagccctttggtgacctaggtgataaaagacagcctgttgtcactttgtagggaggctggaagcccaaacctaggaattccttgtttaagcagccatttactttttgtttgtctggtttggtttggtttttaattttttttttgacagagtctcgttcttgttgcccaggttggaatgcagtggcacgatctcagttcactgcaacctccacctccagggtttaggtaattctcctgcctcagccttcttagtagctgggattacaggtgccctgtgccaccatgcccagctaatttttgtattttttttttttgagacggagtctcgttctgtcacccaggctggagtgcagtggtgcgatctcggctccctgcaagctccgcctcccgggttcacgccattctcctgcctcagcctcccgagtagttgggactacaggcgcctgccaccatgcccggctaattttttgtatttttagtagagatggggtttcaccgtgttaaccaggatggtctcgatctcctgattgtgatctgcccgtctcagcctcccaaagtgcagggattacaggtgtgagccaccgcacctggccttaatttttgtatttttagtagatggggtttcactatgttggtcaggctggtctcaaactcctggcctcaggtgatccgcccacctcagcctcccaaactgctgggattacaggcgtgagccactgcacccggcctttaagcagtcatttacaaacttcaattgctttttctgtttgtgtggggaaagcttccacccagcctgcgaaagtgtctataaaaatcagaatatatttgaattcccctttaggggtatctgtgtaattcgccaatcttctccaggataggtcttcttatgctgcactggggcagagccagtggatgggctcaggaattatttctaagacaaatttcacatgcttgagttacagagtccactgtggcttttttatttttattttttgagactgagtctcactctgtcacccaggctggagtgcagtggcatgatctttgctcaccgcggcctctgcctctcaggttcaagcaatgctcctgcttcagcctcctgagtagctgggattacaggcatgcgccaccacacccagctaatttttatatttttagtagagacgggatttcactaagttggccaggctggtctcgaactcctgacctcaggtaatccacccacctcagcctcccaaactgctgggcttacaggtgtgagccactgcacctggcccactgtggctttttctttctttcttttttttttttttgacaaggtctcgctttgtcacccaggctggagtgcaattgtgcaatcttgactcactgctgcctcaaactcctgggctcgagcaatcctcccacctcagcttcccaagtagttagtaccacagatgcattccaccatgcccagataatttttaaaaatgcttttgtagagacacagtcttatcgtgttgcccaggctggtcctgatctcctgggctcaagcaatcctcctgcctcagcctcctcaaatgctgggattactggtgtgaaccaccatgcctgttaggctgtagcttttaaagccttgctcactaggagattttggattaaattccatagtgagtctctctcataatgagtttcctcatgaagtcttttgatgactttccattggtcagcttctggtaggaaaaggcattgttgctgatcttctagccaccctgaccatttaaattataccctccttcatctgctcagtttttttttttttgatggagtctcgctctgttgcccaggctggagtgcaatggtgccatctcagctcatggcaatctctccctcctgggttcaagcgattctcctgcctcagcctcccaagtagctgggactacaggcatgcaccaccacgcccagctaatttttgtgtattttagtagagacagggtttcaccatgttggccaggctggtctcgaactcctgaccttaggtgatcctcccaccttggcctcccaaggtgctgggattacaggcatgagccatcactcctggccaaccactgccaacttctttttttttttttttttttttgagatggagtctcgctctgtcccctaggctggagtgctgtggtgcggtttcagctcactctaagctccacctcccgggttcacgccattctcctgcctcagcctcccaagtagctgggactacaggcgcctgccaccatgcccagctaattttttgtgttttcagtagagacggggtttcaccatgttagccaggatggtcttgatctcttgacctcgtgatccgcctgcctcggcctcccaaagtgctgggattacaggaatgagctaacgcgcccggcccagctgcccgtttggcagctctatcagcctggttgtttccttggctgattaaagaattgtctttttgatgccctttataggacataacagctatttgggcagggagcttaatatggtttggctctgtgtccccacccaaatctcatctcgaattgtaatcccctcatgtcaagggaagtacttggtgggaggtgactggatcacgggggcagtttccccaatgctgttttcacaatagtacgtgagttctcatgagatctgatagcttaaaagtgtgtggcttccttcactcactctcctgctgccatgcaagatgtgccttgcttccccttcaccttccgccatgattgtaagtttcctgaagcctcccagccatgcagaactgtgagtcaattaaactttctttgtttataaattacccagtctcaggtatgtgtttatagcagtgtaagaacagactaacatagagatgaactgcctcaaggaggaataaaatcgcttcattgggttttgtcggggtgctcctggcagttagcattctcctctttccagacagctgcatgagtatggagcattaggaatccatacttagaatcagtatatatattaagtctcttcccttcttcaagctgaagagcccttaactaaggcttggagctctgcttcctgagctgaagtgcttaggggaagttattttgcctctctggtccagcgtaggctgacaatagcatgttttgccttccgggctccattttatttgtttgtttgtttgtttttttagatggagtctcgctctgtcacccaggctggagtgcaatggcgtgatcttggctcactgcaacctccgcctcccaggttcaagcgattctcctgtctcagcctcctgagtagctgggatgacaggcgcatcacgagcccaggacttcgagaccagcctgggcaacatggtgaaacctgtctctgctaaaatacaaaaaattagctgggtgtggtggcgtgccaccatgcctggcctgcaggctctattttctacaaaacaacccccatctgtaaaccattcttcatctggattctctcaaggggtctcccgtaaatctatccaactagaatagatctgctccaaagtttccacataggtgtgttccagtgtccccaaggtgggcaagggaaggagggtggcagcattcaaggactcatatatctttaaggtcaagtctggggtgtctaacagtggggcttgattttgagttaaccttccccgagttagccagtggctccctttgatttccaacacattctggacctggtaaggagtataaacttcaagggattggcctagcatgagtttggagatatccctgaccaggaggctggtggctgccactgccctaagacagccaggccacacctgggctactgggtccagttgatttaaaaaataagtcactggcctttggacaggccctagcttctgaattaggacttccagggctttgcccagagaggtggaggctatctggaaaccccgggggtagcactgtccaagtacagtggggagcttcctgagtctctggatccttccattcaaaggcaaaaatgtaggtggagtcaggatgcagcatatattaaagaaaacatcctttagatccagtacagtgtaaaactgtgtgcacccagggatttgagagtggagtgtgtatgaattagggactgaaggatgtgtgggaacaactgagtcattcactactctaaagtgtggaagaaactggtattctacatttggtttcttcacaggcaggactggagtattacaaggggactgcagggctgaattagtctgttctgtatcaatgtttccaggaggggccatatcccttgtagggcttctggcctcaaatggtattttggcttgcgtgggtagggtaggcctggcttaagctttattttaatattctcctcattgatgacctgtcctgaaatgttggtatcccatacagacttttccactcaaatcaatatcttttctaggactgggggtagcttctgatcttggggaaccaaaagggccagtaaatggattcctttctcaggaggcactgagacttgtatggcattcccctggagggaaactgaggctcccaacttagataataagtcatgaaccattaaaggaaggggacactcagggacatataggaaggaatgagtgatagccttagatccaattttacaagtcaaaggaaaggtaaactgtcttaccttgggttgtccatctgttcccgtcactgtacaactggcgctgaacagagatccatcaggatgggtcaggacagagtagggggctctggtatccataaggaattcagtttcctacctgccatattgagggtgacccaaggctccacagtggtgatggtgatggaactcttcaggactggaggcagataagcatttgagaacacctcattcagagggggtagcctttttatttgagaggccagcaacaagaggagtgggctggggaggtctactccatcctggcttcccagaaaagaatggacagtcctttctccagtgcctcttcttacagtaagcacactggttgcaccccatttccatggacattgggtggggtttaatccccacccccccgcattcaggtttctctgttacctaaggtcacctcaaggtgggcctatgattatagcagccaaaatgtgtgtcttcctttttattctctcatttttctacaccttctctgcctggtcccagttgttaaaaatgttgaagacctctgctaccaacgttgcttgaagggtctaagggtcagctttcagcttttgaaggttttcccaaatgtctggcacagcgtgggttataaaatgcatggccagaagtgttaggccttcattggtccttgggtctatgttactatactttctaaaagcctcagagagcctattaaggtacccagctggattttcatccacttcctgagcaattattttactttattatactttactggttttgtctgacaccctctgatatgcaattaaggaagtgattgatccttaaccagtccctgtcatccgtataaacccattgcgggttctgctctgggactgcctcaccagatacccagtaaatgacatggccaggattatatctggccatctcctctgcatatttcttaccctttccaagattcgagttttttcaccaggagtacaacaacgagttaggactacaagaacatcttgtcaagtcaaaggaaaggttagactaaacttaataaattcatcactaaacctatctggattgttcaagaaccggccaaaccaatccttgccttgatttatgtctgacattggtaagggtccatgtacctgagttgcccctctagttccatccgttacctcccagggggaaagcagccctggtatggtggggaagtgaaggagggtgctgacttggagcccagttggagccacactggggacagcactgagggttgttgaggagtagaaggggaaagccttcctgacccagcatggtatggaggaggctccagacagaaggagaaaggatccacagtagcagagaggcctgcttcccaccctgcccttagaaaggtagtgagagaattgagccctaggggttaaaatctgagacaggacttggctcatctctcagctgttgcttgagaggtaccatataaacctggcaggagtcctagagtttgagatccagatataatttcctgaaggcctgcatgtatggaatctcaagctatttattagaattttttacagtatatatccaattggaaaatgatgttgtaactgaaggaccccattctcaggtcatttctcttggtaccccaggggatactgaggccaagcaacatcacagagaaacacgagcttctttttctttgtaatatctcatttaaactgatcccaattacagaggatgcatccaagggggggaatcttttgggacgtctgtagtgtttcccatggtagagctggtgtcctgtaatcaagaggtctggtgagggatgcagcctctgactctgacagtcttcacaattgcagcacacatcctggtctgactcatcccagaccttcaaatccctggcaagaactaagcaagccaaagaggacagagggaggagagcagaacgagggggcttgagagcctttagctcttggatttgccagcttcaacccacaaagtctagcaagtagtagattttacatcagctccaagtagaacttactctacacccacatttatttacatggactctaacaagaaacgagatgatgtactagacagaggaaaaatttcatctggcctaatgagtaaggcttccttccaagaatcctggagggtggcttcacccatgcaacaaggaccagaaacaagaacgcatttccattcagacaactgacaaaacagattataaacgtccaggctccacaaagaagaatacggtcagggaaaatactgagtggtttcagtatttgaaacaaaagagaattccagattgccggctggtacctagcccacacatgtctggggcagttccctagaccaatctcagaagggccagccagaatcactccaactgcctacgcaagtttcccagaagggctaactggaatcaccccaacttcccacccaaatttccaaaaataagggagagaaggagagacaaaagaaagaaagaggcccttatcaatgtcagacataagtcaaggcaaggattggtttggccggttcttgaacaatccagataggtttagtgattaatgtattaagtttagtctaacatttcctttgacttgacaagatgttctagtagtcctcactcattgtactcctggtgaaagtttcaaatcttggaaagggtaagaaatacgcagaggagatggccagatataatcctggccatgccatttactgggcatctggtgagagagagagagagagagagagagagagagagaagaagaagagcagactcacctagggtccagacttgactctccaaagcaccaacaccaaagcaatggtccagagtggccacctttgttaccacctggtcagttgcctctgtcctccaggaagtcttgctaactcctgtggggacctaaaatgagggtcccatctggggtaccaggagatgttacaatcatccttggttcttgtagtcttccaggatagaaatcaagtgagattgctgggtgtggtggctcacccctgtaatcccagcactttgggaggctgaggcaggtggattgcttgagcccaggagttcaagaccagcctgggcaacatggtgaaaacccatttctactaaaaatacgaaaaaaaacagctgggtgtggtggtgcacacctgtaatcccagctacttgggaggctgaggcaggagaattgcttgaacctggaaggcagaagttgcagtgagctgagattgtgccattgcactccagcctgggcgacaaaacaagactccatctcaaaaaaaaaaaaaaaaagaaagaaaaagagaatgtttattttagcttgtgcacaagaaaggtcagcactgcaaaaggaaaagggtgggctgcaccccaaagggagcaggttgatctgtcttataggggcctagctgctgtgacgtgcctgtcattgaatgtttaggagggatttctttggtgcctgcacagtggttcaacacgctttttcatacattgtatataacattagcattttaaatcacctctgggcatgatttttagcattaaaataaggaaaagttgaaacaagcctagctgtacttgcaggtccctggggaagtccctaggcccctaaagcaggaacttgtggttactagcttcttgggcctttgatgctgattggctggagattaggtaagctacatcttgagtaaggggcttttcttctttttctctggaccacatcaaaacaggaagtcagccagcttgcctgtcacaaaaccaggagtcaataaataaaatgatttattatttgaataatgtatttgtaggttcttttgggttctctacacatacaatcatattgcttatgaattagtttaattccttccattctcatctttataacttttctttaggctttccaatagataattgaataaaagatatgatgggggcatcctagtcttgcttctgatcacaaagaaaatactttccattggtttttgttgttgtttgagagggagtctcgctctgtcacgcaggctggagttcagcggcacaatctaagctcactgcaacctttgcctcctgggctcaagcgatccttccatcttagcctcccaagtagtagggactacaggcacatgccaccacgcccagctgatttttgtatttttctgtaaagatggggtttttgctcaggctggtctcgaactcctgggctccagtgatccacctccctcagcctcccaaagtgctgggattacacgcatcagccactacacccagcctgttttcaatattttgctattaagtatgatgcttaccgtagcatttttgaaagtatacattattgtattaaagaagtttccttctacttttaattgtttaatcataaatagatgtttaactttatcaaatgatttttctgcatctgtctcaatgatattaatatccattgttgatcattaccttgatgtagagttgctaactaagatacaagacctccagttcaatttgaatttcaggtgacaattaatttttagtataaatatgtcccatgccatttattggctaaatctggaaacctgtctagttccattatttcaccagggctttgcaaaatggggatttttaatgtattattttctcttcatttattaactacaatgctattatacaaagaagcatcccctcattaattctctggttaccctaaattgtagttaatacagaaaaagcaacttaaatgcttcaattttcagttttagtacattctctctaaaggtaaccaaaacgtgtgtgtgcgtgtgtgtgtgtgtgtgtgtgtgtgtgtgtgtgtatgtaatatccttatgaatgcatggatttttaacatttgaagtggtcaaaccttagaccagtgggagctgtcttggtttatggtacatttcctacccagaaccacaatcatccatttctaaaagagccacaattcctatgattaccaaattgtatttatttatttattttgagacaaagtcctgctctgttgctgaggctggagtacagtggcatgatcatggctcactgcagccttgacctcctgggctcaagtgatcctcctgcctcagcctcccaagtagctgagactacagacgtgcatcactacacccagctaatttttaaattgtttgtagagacaaggtctccctatgttacccaggctgctctcaaactcctggattcaagtgatcctcctgacttggactctcaaagtgctgggattataagtgtgagccacgtgcctggccccaaattgaatttagacactataatttgagcactaggggaggaactgcctttaatatttttaattttgtaaaacatttgcacagttccagagccaaaacttgacaataagttatcttcacagagctttagctgccatccctgtcctctccacatttcctcccttctcctgtgagtaaccatttttatgggattttcattcaactttccatcatttctctttgaaaatatagggaaagacatacatatacaagtgtgcgtgtctgtgcatttccctttccttcttttgcaaaaggtagcatattatagcatatcatacacattgtgttttcttctttttgttttgttttgttttgtttttatgagaccaagtctcactcggccgcccaggctggagcgcagtgtcacgatctcacctcactaacctccacctcccaagttcaagcgattctcctgcttcagccactcaagtatctgggattacaggtgtgtgccaccatgcccggctaatttttgtattttttagtagagacgggtttcaccatgttggccaggctggtcttgaactcccgacctcaggtgatcctcccacctcagcctcccgaactattgagatcacagaagtgagccactgcgcccagctcacactgttctttattttactttttttacttgacttttttttttttgagacggagtttcactcttgttgtccaggctggaatacaatggcacgatcttggctcaccgcaacctctgcctcctgggttcaagcaattctcctgcctcagcctcccgagtagctgagattacaggcatgtgccatcacgcccggctaattttgcatttttagtagaaatggagtttctccatgttggtcaggatggttttgaactcctgacctcaggtgatccgcccacctcagcctcccaaagcgctgggattacaggcatgagccactgtgcctggcccatgagccaccacgccaggcaggcacgtactatttttcattcccactagcaatgtgagagtgccaattttcccacaaccttggcaagagtatgttatcaatctgataggtgagaaatggtatctcgatacagttttatgttgcatttgtagtatcatgagataaatcatttgttcatttaagggtttgcattttctatgaattctgttcttttgttttcttaccttgttgtgtttttgtcatgcataaaattgtaattattatgtagtcaaatgtatcagtcctttcttttattgcttctgtaatttgaatcaggtagcaaaaaaaattgaccactgccaggttataaagaaattcattggccgggcacagtggctcatgcttgtaatcccagcactttgggaggtcaaggcaggaggattgcttgagcccaggagttcgagaccagcctgggtaaaattgggaagttctatctctaccaaagaattacaaaaattagccagttgtgcaggtgtgtgcctgtagtcccagctattcaggaggctgaggtaggagaattgcttgaaccaaaggggcagaggttgcaatgagccgagatcatgccactgcactccagcctggacagtagagccagaccctgtctcaacttaaaacctaaatgaataaattcattcacatttagtagttacagggtttcacattttaaaatttagatctctgaccttttcacatttgtcctgctgtgtggtttgaggaatgggtttaattttatattcttccatagagttgtcagcttactccagtatcactgattaaaaagtccttcttgtctccaatgatttgagatgcaacctttatcatatactaaatatctatatgcatttgggtctgctctggattctctattctgttccttcattctgtggtattcatgtgctaataccacactgttttcattagaggttttctgttttaatatctagtcaggtcggccaggcgcggtggctcatgcctgtaatcccagcactttgggaggctgaggcatgtggatcacgaggtcaggacctcaagaccagtctggccaacatggtgaaaccccgtgtctactaaaaatacaaaaattagctgggcatggtggcacgcatctgtaatcccagctgctcgggattacaaaaaacaagaacagctaagaaagttctgaaaaactcaggaggctgaggcaagagaatcacttgaacccaggaggcagaggttgcagtgagctgagattgtgccactgcactctaggctagcgatatatatatatatatgtgtagtcaggtcagtggtgcctccctactctggtctttttcagaattttcttagctgttcttgtttttctcattctcccaaataagttttacaataacttctctaattctagataaaaacctgatgatatttttggagggattgcattacatttttaaactaactttttgagagatatttttattatgtgagtctcctatccaaaaccattgcccttccatctatatatgttcatgtttacctttgtgaataatagaaaagcagacactattcacgtttatctttaaaaaaaaaaaaaaaaaaaaaagcaaaataggccgggtgtggtggctcacgcctgtaatcccagaactttgggaggctgaggcaggagaattacttgagtccaggagttcaagaccagcctaggcaacatggtgaaaccccatctctacaaaaaatcagctaggcatggtggtgtgcacctgtagttccagctactcggaaggctgaggtggtgtcaggcctctgagcctaagctaagccatcgcatcctctgtgacttgcacgtataagcccagatggcctgaaataactgaagaatcacaaaagaagtgaaaatgtcctgccccgccttaactgatggcattccaccacaaaagaagtgaaaatggctggtccttgccttaagtgatgacattaccttgtgaaagtccttttcctggctcatcctggctcaaaaagctcccccactgagcaccttgcgacccccactcctgcctgccagagaacaaaacccctttgactgtaattttcctttacctacccaaatcttataaaatggccccacccctatctccctttgcccccaccctatctcccagagtagggaggcaccactgacctgactacatatatataaatatatatatatatatatatatatatatatatatatatatatcgctagcctggagtgcagtggcacaatctcagctcactgcaacctctgcctcctgggttcaagtgattctcttgcctcagcctcctgagtttttcagaactttcttagctgttcttgttttttgtaatcccgagcagctgggattacagatgcgtgccaccatgcccagctaatttttgtatttttagtagacacggggtttcaccatgttggccagactggtcttgaggtcctgacctcgtgatccacatgcctcagcctcccaaagtgctgggattacaggcatgagccaccgcgcctggccgacctgactagatattaaaacagaaaacctctaatgaaaacagtgtggtattagcacatgaataccacagaatgaaggaacagaatagagaatccagagcagacccaaatgcatatagatatttagtatatgataaaggttgcatctcaaatcattggagacaagaaggctgactctcttttcggactcagcccacctgcacccaggtgattaaaagcttttattctcacacaaagcctgtttagtagtctcttcacacagacatgcatgaaaggtgggaggatcacttgagcctgggaggtggaggttgcagtgagctgagattgtgccactgcacgccagcctgggcaacagagacatcctgtctcaaaaaaaaaaaaaaaacagtaaaattgatatgtatagatttgtgtaaccacctccatgaaggggtaggttgcccctccacacctctgggtgtttctcgttaggtggaatgagagacttggaaaagaaagagacacagagacaaagtacagacaaagaataaagggggcccagggaactggcgttcagcatacggaggctccaccggcctctgggttcccttagtatttattgatcattcttgggtgtttctcggagagggggatgtggcagcgtcataggataatagtggagagaaggtcggcagataaacacttgaacgaaggtctctgcatcgtagacaaggtaaagaattaagtgctgtgctttagatatgtgtacataaaaacatctcaatgccttaaagaacagtattgctgcccgcatgtcccacctccagccctaaggcggttttcccctatcttagtagatggaatatacaatcaggttttacacgagacattccattgcccagggacgggcaggagacagatgccttcctcttgtctcaactgcaaagaggcgttccttcctcttttactaatcctcctcagcacagaccctttacgggtgtcgggctgggggacggtcaggtctttcccttcccacgaggctgtatttcagactatcacatggggagaaaccttggacaatacctggctttcctaggcagaggtccctgcggccttccgcagtgtttgtgtccctgggtacttgagattagggagtggtgatgattcttagggaggatgctgccttcaagcatctgtttaacaaagcacatcctgcacagcccttaatccatttaaccctgagttgacacagcacgtgtttcagggagcacagggttggcggtaaggttacagattacagaacaaaatggagtctcctatgtctacttctttctacacagacacagtaacaatctgatctctctttcttttccccacacctccacaatcaagatacagtttcatcaccccaaaacttctctcatgctgtccttttgtagtatccctccccaccaacccctggaaaccagtgacctcgtctctgttcctttaatcttgtgttttcaagaatgtcatacaaatggaatcagaaagtacgtcacctccagtcctatgtacccatttgactatggaaaatttccactcgaatgtcccacaggtaccttagctcaacctcattgctctccttccaatatgcccctcctcctatgtctagattctagtcaaacactatgccatcatccagcagtccaagctaggagtgtcatcctgggttcctcttttttcctttcacccttctttctaattattcttttttttttttttttttttttttttttgagacagagtttctctcttgttgcccaggctggagtgtaatggcacgatctcggctcaccacaacctctgcctcccgagttcaagtgattctcctgcctcagcctccagagtagctgggattacaggcattcaccaccatgcccagctaattttgtatttttagtagagacggggtttctccatgttggtcaggtggttttgaactcccgacctctggtgatctgcctgcctcggcctcccaaagtgctgggattacaggcatgagccactgcacccggctctaattactctcttaatctcattgcttatatgttctttatatctctcaaaacaatctatttctaaatccacaaccattttacaagtgattctggcaaccacctctcaactggattattccaacagctttctgggtttttttgctgagtcttatccttttgagtctctatctacatcacagtaagcatgatcatcctaaacaaacacaaatcttgttaagtcattcccccaatcccccactccctgccacttaaaacccttcacgggttgtcccttgccctcaggacaaattgtaagctccttaggtgacattcaagacttcctataattcaagccttcctctcctatctcaacccaaaactcctgttctcaccctacatgtctcccacacatactcccacttgggttgcttttttaaagtctggaatgtctttctcctcgcctttgtttttttttctttcttttttttttttttcttttttgagttggagtctcactctgtcacccaggctggagtgcagtggcgcaatctcagctcactgcaacctctgcctcccgggttcaagcaattctcctgcttcagcctcctgagtagctgggattacaggggtgcaccagcatgcccagctaattttctgaatttttagtagagatgggggttttaccatgttggccaggatggtctcgatctcctgacctcgtgatccgctcacctcagcctcccaaaatgctggtattacaggcatgagccaccacgcctggctctcctcacctttcttagctaattagtacttgtccttcaggtctcaccttggctctaacctcctggctggaccaatgctctacctttctaattcctgcaggaaaacactggacttttctctttttccttagtagagaagttttcaaagtgggactgcagacccttgcatgtccctgatcccttcagagggtccctgaggtcaaaactatttttataataatactaagatgttattcaaatttttcactcttaatatttgcactgatagtgcaaaaacaatggtaagtaagactactggcccttgccccaaatcaatttagctaataatcatcagattaatggaatcttcttgttttaatattacaccaaaactctacaagtggaagtatcttaaaggttagttgcaatatggtgtctgaaacgatatcagtgaattatttccatgctattacagtaaaatcccttggtctatattgcactttgcatggatcttttacccattcatagttttatagcatcatgcaacaggaatttggaaaatattggtgcagtgagttatacagctttccaaatgttgaaacatttgttataaaatactgaaaaattatagtcatagatatccacatcattctaatctgaaaggcaataagcatttgggaagctgtcaagctcatggtggcagattaaatatacttccatattaccactacttatatatgtgtggctacattttttttggtatacgttaaccgaaacaaactatcacagcacattgaatgcaaaagcagacattggccaggcgcagtggctcacgcctgtaatcccagcactttgggaggccgaggcaggaggattgcctgaagtcaggagttcaagaccagcccggccaagatggcgaaaccccgtctccactaaaaatacaaaacactagccgggcgcagtggctcgcacctgtaatcccagctacgtgggaggctgaggcaggagaatcacttgaacctgagaggcagaggttgcagcaagccaagatcgtgccattgcactccagcctgggggacagagtgagactctgtctcaaaaaaaaaaaaagcagaaaaaaaagcagacattaagatccagttgttttccatcaagctggacattaaagagatttgcaaaaatgcaaaacaatgctactcttctctgaccataatagaattaaagtagaaatcaattaacagaaagatgtctaggagatgcccaaatatttggaaattaatcactcacttctaaataatccaggagtcaaagaagaagtattaagaagaaatagaaaatatttttcacttaatgaaaataaaatataacaaaatgtatgtaagcaattaaggcagtttttagggggtaaatttatattagcaaacacatatgtcatgaaagaaaatctcaaatctaaccctccacgttaatattgtagaaaaagaaaagtaaatgaaatccaaagcactgaaggaaaaagaaaataaagagcagaaatcaatgaaattaaaaacaggaaaaatcaatgaaaccaaaaattttccttatgaaaggtcaatacaactaataaacctctaaccagacgaaccaagaaaaaaacagagaagacaaaaattacctatattaggaatgatagaagagatatcactacagtatctataaattttacaacttacatgtaatagatcagtcccttgaaagatacaaactaccacaattcaccaaagatgaacaagataaagaggtcttagaactattaaagaaattaaatttatagttaaatatcttcccccgaaaatctctaggcccagttttattggagaatgttatcaagtattattgaaagaaataacatgaattctaaaaaattctctttcagaaaatataagaggagaaatactttccaatttgttttatgaggctagcattgccttgataccagaagccaaagacactacaatgaaagaacactataaatcagtatccctcatattagcaaattgaatctagcaatataaaaaggacaattcatcatggtcaagtagggcttatcctgggaatacaaggtctgttcaaaattttcttgacaaaagtgaacatctagcagggcgtggtggcacacacctgtaatcccagcactttgggaggctgaggcaggcagatcacctgaggtcaggagtttgagaccagcctaactaacattgtgaaaccctgtctctatactaaaaatgcaaaactagccgggtgtggtaggaggcacctgtaatcccagctactcaggaggctgaggcaggagaattgcttgaacctaggaggcgaaggctgcagttagccaagatggcaccactgtactccatcctaggtgacagagcaagggttcatttcaaaaaaaaaaaagtgaacatccattcagggtttaaaaaaaaaaaaccaactcagcaaactaagaagagaaagaaacttccttaatctgctaaaagggcattttgaaagacacttaatgttagaagtctaaatgctttccaccaaagattgagaacaaagaaaagaatgtttgcattcaccactcctagtcaatattgtactgaaagtcctggccgatgtaataagtaggaaaaggaaacaaaagtaatgtcgattgaaaaggaagaaaaataaaactgtctttattcactaatgacatagttgtcacaaaaaaaactccaggaaatctacagaaactcctaaaactaataaatgatttttacaagatcacagaataatgtgcaaaagtcaatcatatttttaagcataaggaaacaaaaatcagaaatttaaaaaattttaataacatttataatatcataaaatatgaaatacatagggataacctgacaaaagatttacaagacctatacactgaaaactaaaaaacattgctggtagaagttaaggaatggctaaataaattgggagattgccgggcgttggtggctcacgcctgtaatcccagcactttgggaggccgaggcaggcggatcacgaggtcaggagatcgagaccatcctggcaaacacggtgaaaccccgtctctactaaaaatacaaaaaattagccaggtgcggtggtgggcgcctgtagtcccagctactcgggaggctgaggcaggagaatggcgtgaacctgggaggcagagcttgcagtgagccgagatagcgccactgcactctggcttgggtgaaagagcgagactccctctcaaaatataaattaaataaataaataaataaataaataaatagggagatataccaggttcatagattataagatttaatgctggccgggtgcggtggctcacgcctgtaatcccagcactttgggaggctcaggttgggggatcacgaggtcaggagatcaagaacatcctagccaacaggcctagccaatatggtgaaaccccgtctctattaaaaatacaaaaattagccgggtgtggtggcgcacgcctatagtctcagctactcgggagcctgaggctggagaatctcttgaaaccgggaggcggaggttgcagtgagccgagattgtgccactgcactccagcctgacaacagagtgagactccatctttaaaaaaaaaaaaaaagaaaaaagaaagaaaattagatcaacagaacagaatcaagagtccacagatagatgtacacacatgcataatcaactgatttttgacaaagctgcagggcatttcagtgggaaaagataatgttttcaataaatggtactggagcgactgggtattcacatgcaaaaagatgaaacttcggccaggcacagtggttcaggcctggaatcccagcactttgggaagccgaggcaggtaggtggatcacctgaggtcaggtgttcgagaccaccctggccaacatggtgaaactccatctctactaaaaatacaaaaattagccgagcgtggtggcaggcacctgtgatcccagccactccagaggctgaaggaggagaatcgcttgaaccttggaggcagaggtgcagtgggctgagatcgcaccactgcactccagcctgggcggccgaatgagactctgtctcaaaaacaacaacaacaaactcgaaatggaacatagatgtaaatgtgaaatatcgagctatcaaacttcttcttcgccccccaaagtgctgggaatacagatgtgagccaccacacccagccaatcgaactatcaaacttctgaagaaaacatttaaaaaaactttgtgagttttcaccaggctaaggtttttaaaaatacaacaccaacagcatgattcataaaagaaaaaattgataaattggacttagaatccacagtggtacatgccaccatgtcaggctaatttttgtatttttaacagagacgggtttcaccatgttggccaggctggtctcaaacttcagacctcaagtgatccacctgcctcagcctcccaaagtactaggattacagatgtgagccattacacccggcctttttttcaaatttctaagaaaagagattttttttttttgagatgggagtcttgctctgtctccaggctggagtgcaatggtgccatcttggctcactgtaacctccgcctcccaggttccagcaattcttctgcctcagcctcccgagtagctgggattacaggcacacgccaccacgcccagctaattttttgtattttttagtagagactgagttttaccatgctggccagactggtctcgaactcccgactgcaggtgatccactcgcctcggcctcctaaaatgctgggattacaggcgtgagccactgcacccggcccaaatcactgtattttggaaaagataagttcaaaaattagccgggcgtggtggcagacacctgtaatcctagctacttgggaggctgaggcaggagaatcactggaacccaggaggcagaggttgcagtgagccaagattgtgctattgccctccagcctgggtgacagagggagactgggtctcaaaaaaaaaaaaaaaaagaaaaaagaaaagaaaagttcattgatcctagcccttgcctctgcccgtgtgtaggaaaatatcgaagaggattaatgattatgtgtcacacccaaaccttgatgggattttgctctcatgtaacttctgagaacatgagctgcagccacctgtataaaaaccgcaggctgaaaccctccggagcagtccaacggttactttgaaagactctcccaggttgtgatcctcagtaagacttctgaatcaaactaactttaattctctaaaagtaggtttttctctttccttttttttttttttttttttttttgagacagggtctctcactctgtcgcccatgctggagtgcagtggcacaatcttggctcactggcagccttgacctcctaggctcaagtgattctcccccctgagcctcctgagtggctggaactacgggcgcacgaccatgctgggttaatttttataaacattttttggtctcactatgttgcccagggtggtcttgagcttctgggctcaagcaaccctcctgcctgcacctcccaaagtgctgagatgattataggagcaggaatgagcacttggcctgatttttgtcttagttgacaatagtcagtgttcaggaaatggttatttatgattattatccataaaaattccaaagggatacactgatttgtcattaccaaaggggccagagagaacctggcaattatttgggcttaggggaataaaggcaaagctctcagatgagtttcagtctgaagcctggaaacagggaggatgggaggccaggggcaagatgatggattccattttaagtaatagattctaagtctcaagtaaaaatcaaggttgccttttgggtgtaaggtagaaacctgggatacagaattaagaattgcccatgttaggcacggtggctcacgcctataatcccatcacttttcgaggcttgggagggtagatcacttgaggttaggcatttgagactagcctggccagcatggcgaaactccgtctctactaaaaatacaaaaaattacccaggtgtggtggcccacgcctgtagtcccagctgctccagaggctgaggcatgagaatcacttgaacctgggaggcagagttgcagtgagccgagactgtgccactgcactccagcctgggcgccagagcaaggctctgtctcaaaaaaaaaaaaaaaacttacagaattaagagttgctcatgcagaggaaaacaaaaagatttattgtcattgtcgttttccttttttttgtggaaacacagacactaggactttaagaaaggcaggagccagatctaatgaatctctgggttctcccagcagagtgatcctccctactcagtgatctccactgagcaggagccaccaattctctttgtaacttaatggaagtggctttcccctgtctgcacctcagtttcatttgtaaaatgaggaaaagcaaacctacctctgagggctgttatgagatcatggtttggaattttcctggccaaaagtgaatgcgcaagtggtgtctcgtgtgacaacccatgatccatccaccaaatagaaaacaatgtccaaacacacaaaatatcaagagtatacatacaaatggtgggagtgtaaattaatacagtctgacagtgtctactaaagctaaacacatacctgccctacgaccagcaattccacacttgggtctattttgtttttgtttttgtttttctttgggagggggatctattttcagaagaaatgaatacgtaagtttgtccaaagaaatgtactagaatattcatagtgagagacaggactagctggatttcctaggccgactaagaatccctaagccaactgggaaggtgaccgcatccacctttaaacaaggggcttgccacttaggtcacacccaaccaatcaggtagtaaagagagctcactaaaatgcgaattaggcaaaaacagaaggtaaagaaatagccaatcatctaacgcctgagagcacagagagagggacaatgatcggcgggatataacccagcactggagcccgcaaggcaatcccctttgggtctcctcccattttatgggagctctgttttcactctattaaaccttgcaactgtacactcttctggtctgtgtttgttatggcttgagctgagctttcgctcactgtccaccgctgctgtctgctgccatggcagctgtggcagacctgccgctgacttccacccctccggatccgggtgtccactgcacttctgatccagcgaggcggcacccattgccgctcccaattgggctagaggctcaccattgttcttgcgcgggctaagtgcccggggttcctcctaatcgagctgaatagagctataacactcaccgcatggcccaagattccattccttggaatccgtgaggccaagaaccccaggtcagagaacaagagacttactgccatcttggaagcggcccaccaccatcttgggagctctaagaacaaggacccccagtaacaatagcactataacacccctaaactggaaaatatccagtctgaggtatagggcatagtcataaaatggaaaccatccagaatgaaaatgaaagaactatttctacacacggtatgcatgaatctcacaaaaacaacattaactaaaagaaaccaaacacagtacacagagtactggtctagagagaaggagaattcaaaacaaacaaaagtaacccagctgttacaagtcagggcgagtccagccaggcacagtggctcatgtctgtaatcccagcactttggaaggctgaagtgggaggatcatctgagtccaggagttcgtgaccagcctgggcaacacagcgaaaccctatctctacaaaaaacattttaaaattagcaaggcgtggtggcacacgcctgtagttccaggtgcttgggaagctgaggtataggattgcttgagtctgggaggttgaacctggagtgagtagtgatctcaccactgcactccagcctgggcaacagagcaagaatctctttcaaaagatatatttttaaaggctacatggggtgggtcatgcctgtaatcccagtgctttcagaggctgaggagagaggatagcttgaggccagcagttggagactctagtgagctatgatcgtgccactgcactccagcctgggcgacagagactctagctcttaaaaaaaaaagaaaaaaacagatgaatgataacctttagaagggatcgggaggccggatgtggtggctcacgcctataatcccagcactttgggaggccaaggcaggcagatcacttgaggtcaggagtttgtgaccggcctggccaacatggtgaaaccctgtctctactaaaaatacaaatattagcctgggcaacagagtgagactccgtctcggggcggggagtggaggggggagaagaagggatgggggaaaggggagcacatgaggcttctactgtttggttttgcgatctggattcaggttgtatgggcatgttcactttgtgtaattttgtcgagctgtaatgatttgtgctcttctctttatttaacttcaataaaaggtttacttaacaaaaattgtagctggtgtgaagggtagcagtgtttccctggggccaagagtacaggctttggggacagacagacctgggtcccaatctatgctttgtcccttcggcacattgttgactgtggctggtggcttcgtggctctgagcttgtctccttctctataaatgaggaaacataatacttgcgacgatgatgcctgtaaagcttaagcgcaggacctggcatagatctgtaaggcggaaacctgggatacagaactaaggtctatggatctcctgtgctacccaacttctgggcactcgctgcctccttttccccagcccagacgcgtgggttctactcgattggttgctcactgcgggctcggggctcctcaatcccggggtaaagcccagtatgaaatgtcaccttcaggggcagctcggatcttcccacgcccgcgcggcgcacaatctttggatcagcgccacgtggagaccttacccgcccgtacgatcaatcccttctgtggaacccagctcaaggaccctccagcccagacactagaaagcgaagagcagttggccgccagactgtccgtgccagagctctgcgaacttactccgttgaaagagcaacggggctgcgccacctcccggagagaacccccagccctccacggcagggcgagatggcgccaccgcgtgatactgcgcacgcccacagctcccgtcccgccctcgcgcctgcgggtacggacagcgcatgagcttatgttgagggcggagcccagaccagcccttcgtcctatcctgcccttccagcacctctcagccgtaacttaaactacacttcccagaagcctcctcagccagggacttccgttgtcgtcagcggaagcggtgacagatcatcccaggccacacagaggccggcttggtcactatggaggagataggcatcttggtggagaaggctcaggtacagtggggacttgggctttttagtccgggccgggctcgcggggagagggtgaagccagacctgagtggggggaggaatggcttccaggaccccggcccaggttggggttattttagaggcctcggtggagagctttgtgccattcgaaggcctgtctgggtggccgagtgatggtaggaggtaaggctcagaaagcggggctgggggagtgagtgacgttagtgggtctttgagacggattgatttcgaaccctggccggtagtgcttagtgaggtcggtggcccggcgttgggattgggtcaggcggtgagtgatatatgggatcccgccgtgcggccgagtgatccccgggtctgggctgcggggctgactgatgttcagggctttgctgatgggggtaatggggcgggtagttaagtattatctgtggcttgcctgagtgatatttaggtctaaggtgagttaggagactgtgacataagggatctttgaggggaaactggggaatgttgggactcgttgaaggcgcagtcactttaacagcctatctaggagagccatgtgacattaggaacctcttgaaggggattgggtggcatttgggtctgataaggagttgatgtgacgtttagatcctagttgggggttgtgtgacactggggacatgttatgagtggtatatgataacataagatctgtttgaggggcaagttgacataaagagcttgtttaggtggccaaaaggtttccaggatctatttagagggtcttaagatatcaggggtctgttaggggctaagtgacatcagggtgaagtggggaggggaacaaacattagtgaagttgggaagctttcatgagaggactgtcttcttccaatgtgagttatcccctttcgtctaggatgagatcccagcactgtccgtgtcccggccccagaccggcctgtccttcctgggccctgagcctgaggacctggaggacctgtacagccgctacaaggtacattcgacccccaacccagaccttgcacaggacctgacatctcatactcttccccactttccaccactctctggatcagcaagtctggagccatccccttctgtcccctctctgctcgcagaagctgcagcaagagctggagttcctggaggtgcaggaggaatacatcaaagatgagcaaaagaacctgaaaaaggaatttctccatgcccaggaggaggtgaagcgaatccaaagcatcccgctggtcatcggacaatttctggaggctgtggatcagaatacagccatcgtgggctctaccacaggtgtgctaaggacacctcattcattcatctgtccacttaacaactatttcctaccatgtgctaggcagcagcaaacaaggcagggcagtgcagtgcaatgttcttcagagtattttgactgatcgaaaggtagaaatacatacatatatatatatatacacatatatatatgtatatctatgttttttttgtttgtttgttttttgttttgagacagagttttgctcttgtccaggctggagtgcaatggcatgatctcggctcactgcaacctccacctcccaggttcacacgattctcctgtctcagcctcccaagtagctgggattacaggcatggaccaccaagtctggctaatttttgtattattagtagagacagggtttcaccatgttggccagtctggtcttgaactcctgacctcaggcgatccacccgcctcaccctccgaaagtgttgggattacaggcctgagccccactgcacctggccagaaatgtattttacattgtgattatctgtatctgtctcttactttttagatagatgtgtaaaacataagtttcaccatgaaatatttagccttactaggtgtggtatatgctgatgttttctatcctattctagtctgttttgctttaaacacagttctggtcatgaccttccaaattgatttcacaactactactggtttggggcctgcagtttgaaacgatgagtaggagtgttaagagattgggctctgaggccaggcatggtgcctcacacgtataatcccagtactttgggagactcaggtgggcagatcacttgaggccagaagtttgagaccaggctgggcaacatggcaaaaccccgtctctactgaaaatataaaaattagctgggtgtggtggcacacacttgccatcccagctacgcaggtggttgaggcacaggatctgttgaacccaggaggtggaggttgcagtgagccgagatcgtgacactgtactacagcctgggtgacagagcaacactctgtctaaaaaaaaaaaaaaaaaaaaaaatactgggccctgatagggactcagagtccttatcagagtatattgtagctgctgctgtttatataggtctaggccttgccctcttgatagtcattgtcactggcatcttatctgttttttcttgtttctgggctctgctcctctggaccaagccatgttcttgtaaaggttttggagaaaggtgtgcgattgtgcctggaattggactggtgggctatgaggaagtgaggagagggtggtatccaggatgaggcctttctctttgacctgtgggagttgggatagtgtggctttccctgagatggcaccatgggtagaggagtaggtttgtgggaagacagggagggcagtccagagcacatgggaggtgtccaggaggctgctggtcagccaggtctgacaatcaggagagagactgagcctggaaacagaagtgtgcctcactagtatgagatgcagggggaggcctgctggacagccagggctggatgtcaagagagaatcagggcggtagacaaggagttcgtgtgaatactggggacggacagcaggagggaaggctggaggccgagaggggacccctcagggtctgaaccagagatgttggggtgtggagattaggagggaggaagggggaaggggcagtttccaggctgacacttctcgttttcctctctcccttctcgcaggctccaactattatgtgcgcatcctgagcaccatcgatcgggagctgctcaagcccaacgcctcagtggccctccacaagcacagcaatgcactggtggacgtgctgccccccgaagccgacagcagcatcatgatgctcacctcaggtaaagggggagcctgcagctgggagggccccatggggaccttgaggacctggccaggagccccagctctgctctcccaccagaccagaagccagatgtgatgtacgcggacatcggaggcatggacatccagaagcaggaggtgcgggaggccgtggagctcccgctcacgcatttcgagctctacaagcaggtgaggcggtgcaggtggcagggaagggagaggccccattgggtctggggttggaggtggaacccctgactcccacttctcttccttcctctgggtttcagatcggcatcgatcccccccgaggcgtcctcatgtatggcccacctggctgtgggaagaccatgttggcaaaggcggtggcacatcacacaacaggtgagccctttcgcccctgccccgagctctcatcttctggcctcttcgccttgctccctgctcgctcactggcactgcacagtaattagaaacagactctggggtcatagcccacgtgtgcatgttactggctgtgctgacttcacctccttgggcctctcctagtagttgaagactcatttcacccggtgatagtgagcagttaatgaaataatgcagtgttttcctacaatgggttgtgacctattagtaattatgaatttcaatttgtgggttgcagccagtattttgaaacatgaaatagaacagaaagcgccagagaacatccacatggtatttataccatggtacaagtatatatggtgcaagttcatctgtttcgtgaaacttgtttcatacagatgtgcacactcatgtatacttgtggttcttcaaaaatatatatatatattttaattcttaaatttttttgtagagatagggtctcactctgttgcccaggctggtcttgaactcctgggctcaagggatcctcccacagtgctgggattacaggcgtgagccatgtgcctggccccaaaaatgtatttcttattgtaggtgccagacaaaaatgtctgaaagtcactcactctataacttttttttttttaaagccctaaaatcttaagcatatgttcagatcttaacacatgtgagccagggagcagtaggaggtagtagttaagcagtatgttttctggggctagactgcctggctttgaaatcttactcccccagcaacttcttatgtgatcctgggtaaattaacctctctgtgactcagtttcctcacctgtcagatggaaacaatcatagtacctatttttctagggtgggtgttcagaagagcaaattgatacaaagcatctggaatgggcaataaatgttagctgttgtcattgttactcatttgcttggtactttattgaacttttactctgtaccaagccttgtgctggaatgcaaagatgacaatcagagatgtcccttgccttgactgggaaaaaagaaaaagacacctagaactcagtcattcagtgactgtttattgaacacccactatgtgccaggatgtgttgtagatgctagagacatgggccaggcgcggtggctcacgcctgtaatcccagcactttgggaggccgaggtgggaggatcacgagatcaggagatcgagaccacagtgaaaccccgtctctattaaaaatacaaaaaaattagccaggtgtggtggcggtcgcctgtagtcccagctacttgggaggctgaggcaggagaatggtgtgaacccaggaggcggagcttgcagtgagcccagatcacgccactgtactccagcctgggcgacaaagcaagactccatctccaaaaaaaatatatatatatatatatatatatattaattagctgggcgtggtggccagcgcctgtagtcccagctactcagcgtgaacccgggaggcggagcttgcagtgagccgagatggcgccactgcacttcagcctgggtgacagagtgagactccgtctcaaaaaaaaaaaaaaaaaaaaaagaatagagacgtggcagtaaacagaacacctccttatggaggtgatgtcttagttggaaatgtggcccgacacagattcgtaaagtttcttttttttttttttgagatggagtcttgctctgtcatccaggctggagtgcagtggtgcgatctcggcttactgcacgctctgcctcccaggttcacaccattctcctgcctcagcctcctgagtagctgagactacaggcacccgccaccacgcccggctaattttttgtattttttagtagagacggggtttcaccgtgttagccaggatggtctagatctcctgacctcatgatccgcccgcctgggccttccaaagtgctgtgattacaggcgtgagccaccgcacccagcccgtaaaccttcttaaaacatgagattttttgtgtgtgatttttttttttttttttttttgagacagagtctcactctgtagcccaggctggagtgcagtggtgctatcttggttcactgcaacctctgccttctgggttcaagcgattctcctacctcagcctcccgagtggctggaattacaggtacatgccaccacatctggctaattttttttgtacttttggtagaaatggggttgcaccatgttggccaggcaggtctcgaactcctggcctcaggtgatccacccaccttggcctcccaaaattctgggattacaggcgtgagccactgcacccggctgtgatttttttttttaagctcatcacctatcattagtgttagtgtattttatgtgtggcccaagacagatcttccagtgtggccctgtgtacccttcacccagattccctaatgttactatcttatgtaaccatagtataattaggaaaaccaggaaattaacagtggtacaatacaatgaactaaagtttagacctccttcaaagtttaccagcttttcccactagagaccctcacttcaggttctgtcgtttttctgagtgaattggggtggtttgtcactggcagagggagggaagagagaaggtgtagaagggatgtagaaatgggaaaagctgctgactggggttgagttttgttttgttttctagagacagggtcatgtctggcaaggcgcggtggctcacggctataatctcagcacttcaggaggccgaggtgggcagatcacgaggtcaggagttcgagaccagcctggcaaacatagtgaaaccccatctctactaaaaatacaaaaaaattagccaggcatggtggtgggcgcctgtaatcccagctactcgggaggctgaggcaggagaattgcttgaacccaggaggccaaggttgcagtgagcgaagatcgcaccattgcactccagcccggccaatagtgcgagattctgtttccaaaaaaaaaaagagagatagggtcttgttctgtcacccaggctggagtgcagtggtgtgatcatagcccactgcaaccttaatctcctgggctcaagcaatcctccccacctgtctctcctaagtaggtgggactacaggcgtgtgccaccatgcccaactaatttttgtatcttcattttcagtagagacagggtcttgctatgttgcccaggctggtcttgaactcctgggctcaagccatcctcctgcctcagctccccaaagtgttgggatcacaggtgtgagcctttttttcctcttgtttttcggggggaattcatctatttgttccggtgacagcacagcttactaagagtgagtaactgaagcaggagcccattccaggataggtggaaggagtagtagagcccagggggagctgagagattgggaggacagggaaggttggggtaggaaggggactgtagtgattgagtaggaaaggctgacggacaggctcggtcagataaggcaattccagggatgggggtttcatgtggaactggttggacatttgcagaacagccaagtaaatggccaaagtcaggtggtcaaggtgtgttttctgtttagagcagaaaaagtcagaaatcttgaggttaggatgctgaatgagcccccagctgatgcaagtatcaagaaagagggaccccttgagccaggtgtaaagtctggatcttagggagtgaacagggcagggctgaagccttgaacagttcctagcttatgacataaaaccactcagtctatctatggactgcatgtctcccttctctggtggctggaaggagagtcctgggggtatgcttcatacaacacaaagcatctgatccttaagaaacaagtgtaactttaagaaacaaggccagggtcaagcatggggtggctcatgtctataatcccagcactttggaaggctaagccaggaggatcgcttgaggccaggagtttgagaccagcctgagcaatatagcaagaccccatctcctcaaaaattttaaaaagctaggtgtggggacatgcctatagtcctagctactcgggaggctgaagagggaggattgcttgagcccaggagattgaggctgcagtaagctatgatgataccactgtactccaagtccaaagggagggcccagaacaaatctgtcttcaaccccattgccaattgtcagttatatcagaacatgcccgtggtccctgatctttttcaggaaattaaaaagctggtccttatagcaaacaggaactcagagctcttggcgaggcagtatgatgtcttagtgtatgggcagcatgcctgttttcttgctgattttgcaagtgctccagaaatgtagactggtttttttctttcttattttagtatttcatatcctgatttttaaatgttgggccaaaaaaatgacacatctggctggacatggtggctcatgcctgtaatcccagaactttgggaggctaaggcgggcagatcacttgaggtcaagagttcaagaccagcttggccaacatggtgaaacctcgtctctactaaaaatacaaaaattagcttggcatggcagtgcacgcctgtaattccagctactcgggaggctgaagcaggagaatcacttgaaccctgaaggcagaagttgtggtgagccgagattgtgctactgcactccagcctgggcgacagagcaagactctgtctccaaaaaaaaaaaaaaagtgacacatttgtaaggatgattcatgatttaggccactgggtcactgtggggtacaagtagatggctattcctcagggctggatgtggggctcacccttgggcatgagggaatgacacaactactaggtatgggtatccaaggaaaaggatgtcttcaaggaattcgcagtttctgttaaagcagaatgggcccctcaggaggctcattcccgcctaactgttgtcatcctgtcatcagctgcattcatccgggtcgtgggctcggagtttgtacagaagtatctgggtgagggcccccgcatggtccgggatgtgttccgcctggccaaggagaatgcacctgccatcatcttcatagacgagattgatgccatcgccaccaagagattcgatgctcagacagggggtaagtgatgctgaaacaaggcccggggtcttggacaggcttgtcgcatgggatgcctgggactgactgtgctgtgcactctcagccgacagggaggttcagaggatcctgctggagctgctgaatcagatggatggatttgatcagaatgtcaatgtcaaggtttggggtttgggatggacaaggggaggtgtggtgtaggaactggggaaagttgggggctggcacctaaggggtggttatcgtgacaggaaggaggtaggagtgcagagatctgagctggcctgccccccaatgtcaggtaatcatggccacaaacagagcagacaccctggatccggccctgctacggccaggacggctggaccgtaaaattgaatttccacttcctgaccgccgccagaagagattgattttctccactatcactagcaagatgaacctctctgaggaggttgacttggaagactgtatcctgctccagaagtcagggaggggccctagttgggaacggggattagatcttcagctcaacttctgccagcaccacagcccagactgtgcaggtgggaccaaggtccagggaggaggggaggtgacagagatggccaaagatgacttccagccccaggcatttaccccatcacacagggaatagtttccttaactcgctgcagatgtggcccggccagataagatttcaggagctgatattaactccatctgtcaggaggtaagtggtggtttctctctggatccaggcagcgggtgtgtgaggacccttcttctctgaaccactctgctgcagtcctgtcccctcatggctgccctgggtcgtgggcgccatctctctcttcctctaccatcactaggggtggatagtacaggggtagtgtttttgtgttttgctttgagacagggactcactctgtcgcccaggctggagtgcagtggggcaatcatgactcactgcagtgatcctcccacctcagcctcccaagtagctgggattacaggcgcccaccaccagtctggctaatttttgtattttttgtagagacagggtttcaccatgttgcccaggctggtctcgaactcttgggctcaagtgatctgtatacctcagcctcccaaagtgtcgggattacaggtgtgagccactgtgccctgccacaggaagtagattttaactctcatccttcaacagagtggaatgttggctgtccgtgaaaaccgctacattgtcctggccaaggacttcgagaaagcatacaagactgtcatcaagaaggacgagcaggagcatgagttttacaagtgacccttcccttccctccaccacaccactcaggggctggggcttctctcgcacccccagcacctctgtcccaaaacctcattcccttttttctttacccaggattggtttcttcaataaatagataagatcgaatccatttaatttcttcttagaagtttaactcctttggagaatgtgggccttgaataggatcctctgggtccctcttaatctgacagatgagcagacgaggtgcatggcctgggttgcagcttgagagaaccaaaatattcaaaccagatgacttccaaaatgtggggaaagggatggaaaatgaacctgagatggagtccttaatcacgggataaagccctgtgcatctccctcatttcctacaggtaaaagacagtaaagaaattcaggtcacaggccttgggagttcataggaaggagatgtccagtgctgtccagtagaactttgcacaatgatggatatgttctgtgttctccagtatggtagctgctcgccacatgtggctaataagtacctgaaatatggctagcatgactgagaaactgaactttttttttttttttttttttttttttttttgagatggagtcttgctctgtcacccaggctggagtgcagtggtgagatcttggctcactgcagcctctgcctcccaggttcaagtgattctcctgcctcagcctcccgagtagctgggaccacaggcatctgccaccacacccggctaaattttgtatttctagtagagacagggtttcactatattggctaggctggtctcgaactcctgacctcaaatgatctgcctgccttggcctccctaagttgttgggattacaggcgtgagccactgtgcctggtcaagaaatggaactcttacacactgctggtgggaatgtgaaatggtaagccacttcggaaaacagtttgacaatttcttatgctaaaaatacacctatcagatgatttagccacttctaggtatttacttaagaaaaaataaggcatacatccatatgaagacttgtaaataaatgttctcattatttttatttgaaatagctaaaactggaaacaacccaaatatccatcagcaagtgaatggataaacaaattgtaatatttgtatgcaatataacaccactcagtaatatgaaaatgaactactgatgtatgcaaaaacgtgaaattcaaaataattatgctgagtgacagaatccagacaacaaataatacataatgtattattctatttacataaagttttagaaaatccaaactaatctaagtaacaaagcataccaatggtatatggggcttggggcaggtgagacggattatagagaaaaaagtaggaggtgatagacatgtttagtttttttgcttgtttgtttttactgtggtaatggtttttcaagtgtgtatgtcaaaacttatcaaattgtacctaatttattgtagttttattgatacctcaataaaattaatagttacatacataaatgtacttgaagttccacctagcacaataaggtaagaaaaaaaattaaggcgtgggactggaaaagaaatgaaactcttcattattcacaaatgtcatgattgcatatatggaaaatctaagtctacacaaaacctattaaaattaaatagtgaatttagcaatgtggctaaacaaaggtcaatataaaatattaaatataagccaggcatggtgacatgcatccacagtcccagctactcaggaggctgaggcaggagaattgcttgagcccgggagttcaagtccagcctgggcaacacagcaagacccactgtctctgaaaaaaaatcaaatacatatatcagcaataaataaataggaaattaaattttaaattataacatttatcaaataaattcttaagtgccaagaataaatttaaaatatgagatataaatagttaaaattacagaatattgacagaaatcaaagaagacaaataaatgttgggatacaacatgttaatgtattggaagattacgagtaaaaatattaattctccacaaattgatctataaacaacgcagcgccaatcagaatcccagcagttttgtcctgctggaaactgacaaactgattctgaaatatataagtaaatgaaaggctcagaaatagccaagagaatatttgaagaaaaaagcaaagctggaagacttacaataccaaatatccagactgatggtaaagctgttgtaactaatgtagtgtggtatggccttaccaatggacaaatcaatggaacaaaatatggagtccaaaaagaaaataatatactcacttgatttctgacaaagttaatcctgtggtacactggagtatgagtgatcttttattaaatgttgccttgtcaactctatgtagataaaataaatctgtgttaccagatgaagagtttttaattgggttgttcaggttattggcatgttgaacaaagaactgaacaaaatgcacagacaaagaaaaagcaacaaaagcagagatttattgaagtgaaagtacactccacagagttagagagggctcaaacaagtggctcaaaagtccagattataatgttccttggggattttattaaactaaaagagcatagtagcacgcctaaacgtcctttagaagcctctaacaggtcatactctataggaatgaagaattctgcccaggaccaatcagaggcaccctgcaaatgagggattcagaatgaaccaatcacaggcattcccattgtgacacaggggaggggaggttcagagaaggagggcctttggcctcgttatttggtcacggagaggtgaggttttcctcttagtccaattccaagaagtcagcaggggttggccttaggttccctgtctccagactctattctcctgcctcatttggacccctacaatctaattgtgaatgtaaaaggtaaaaaaagtttcaaataattacgtagaaggatagcttcatgacctttggtttggcaatattaatcattttttaaaatagtttttttgtttgtttgtttgtttttgaaacagagtctcactctgtggcccaggctggagtgcagtggcgcaatctcggttcactgcaacttccgcctcccaggttcaagcacttctcctgcctcagcctcctaagtagctgggataacaggcgtgtgccaccacacccagctaatttttgtatttttagtagagacggggtttcacctgacctcatgatccgaccaccttgccctcccaaagtgctgggattacaggcataagccactgcacctggctggtggcacacattctttttttttttttttttttaaagacggagtttcactcttgttgcccaggctggagtgcaatggcacgatctcagctcaccacaacctccgcctcctgggttcaagtgattctcctgcctcaacctcccgagtagctgggattacaggcaggcgccaccacgcccaactaattttgtatttttagtagagagagggtttctccatgttggtcaggcctgtctccaactcccaatctcaggtgatccacctgcctcagcctcctgaagtgctgggattacaggcattagccatcgcgcccagccacacattcttatacaaacagttttaacttggttgtaaatatctccactcaaaggatctggcccatgcagaaacacaagacttgtccctcaatataaatcgtaagataggtggtgttttgtacagtctagaaaaccaggccaagttgcagcaaacccctaggttttaatgttaataaagtcctcttggacttcatgggcccaaaagttccagtgttgtattgcttttgtaagaaaatttcaaaactgtaaaaaagacaaatgggtagttcttggaataccaaataagtagtggttaaactggaggtatcagtgcatagctaaggcactaaatttgttataggtcagaatcaactccctaaaatttgatgctcatagccatgaaataaggtggtagagcaatgcaggttccctgatcaaacagcctttcaaaaggagtcttgatcttattcaaagatcatgtcatttaatttgcactatggcctttgccacacataaattatgcagtaattccagtattccactaaaaatccatgacctgaatctcattatgggaatacatcaaactacaaaattgagagacattatataaagtaacaacttttttcttcaaaaatgttgtcataagaaacaaagaaagggtagtaatatcacatgatatcaaagtaggggattcttgctcccttcctcccacaaaagtggacaattagctatccatgaataaaaatagctctaggagagctctggaatccagttaagaagctgcagcaacacagtggagcaaaaaaacacctagaataaccaacataaggggcaggaagaacagtttcatttttaaaaattgaaatcatatcaagtatcttctgagatcacaatagaaaaaaatccctaaaaatcagtaagaagcagaactttggaaactgtataagtacatggaaattaagctcctcaatgaccactgggtcaaggaagaaataaaggaggaagtaaatttcttgaaacaaatgaaaatagaaacacaacataccaaaatgtgcgggatacaggaaaagcagtgctaagaagaaagtttatagcaataaatgcctacatcaaaaaagtagaaaattttaaactatcgaatcatgcaccttaaggaactacagagcaagaacaaaccacacccaaattagtacaaagaaagacataataaagatcagaaaattactaaacaaaatagagactcaaaaaaatacaaaggattaacaaaatgaaaagttggttcttggaaaagataaatagaattaataaaccactagctagactaaccaagaaaaaataaaagaaccaaataaacaaaaccagaagtgtattataactgataccacagaaataccaaagatcatcagagactacagtgaataactatacactaacaaactggaaaacctaggggaaatggataaattcctggatacatataatttactcagattaaatcagggagaaatacaaaacctgaacagaccaataatgtgtaagaccaataatgattcaaatatattgaatcagtaattaaaagtctcccaacaaagaaaaagtccaggacttggtgcttcactgcaaattctaccaaactttcgaagaactaacaccaattctcaaactattcccaaaaattgaagagaagggattctccctagctcattctaagaggccagcattaccttgagaccaaaaccagacaaggatgcaacaactacaaaaaactagaagccaatatccctgatgaacatagatgcaaaaattctcaacaaaatactagccaaatccaacagcacatcagaaaggtaatacaccatgaccaaatgggatttatcccaggaatgcaaggatagttcaacatattcaaatcaataaatgtgatacatcacataacagaatgaaggaaaaaagccatatgatcacctcaatagatttcaaagcacttgatgaaaataaacatcctttcaagataaaaactctcatcaaactaggcatagaaggaacaaacctcaacaaagtaagggccatatatgacaaacccacagctaatatactgaatgaggaaaagccaaaaggctttcctctaagaattggaacaagacaaacatgcccactttcaccactcctattcagcacagtactggaagtcctagccagattaatcaggcaagataaataaataaaagacatccaaattggaaaggagaaaatcaaactgtccctctttaccaatgatatgctcttatttctaggaaaaactaaagaatccacaaaaaactcttagatctgatgtagccaaaaaaccaataggaaagcaatcctgaacaaaaacaacaaagctgaaggcatcacactacctgacttcaaaatatattacaaggctatgataaccaaaacagtatggtgttggtataaaaccagacacacagaccagtggaacagaatagagaacccagaaatgaatctgtgcatttataaccaactgattttcaacaagggcaccaagaacatgtacaggggaaaggataccctcctgaatacatggtgctaggaatattggatatgcatatgcagaagaatgaaattggaccccaatctaccatatacaaaaatcaactgaaaatggattaaatggattaaaaacttaaatggcagacccaaactataaaactatgaagagaaaacaagggaaatacttcaggacattggtctaggcaaaaattttatggcttagaactcaaaagcataggtaacaaaaacaaaaatacacaaatgggactatattatggtaaaaagcttgtgcatcacaaaggaaacaacagagtaaagaggtaacctgttgaatgggagaaaatttttgcaaactattaatctgacaagggactgatatccagaataaaaaaggaacttacacaacagtaaaacaaaacaaaacaacccaaccaaaaaaaatcctattaaaaagcaggcaaagtacatgaatagacatttctcaaaagaagacataaaaatggccaacgggaatagaaaaaaaaaaaagcccaacattaataatcatcaggaaaatgcaaatcaaaaccagaatgagatatcatcttagcccagttagaatgaccattactaaaaagataaaaaataatagatgctgttgaggatgtagagaacagggaattttttttttttttttttgaggcggagtctcactctgtggcccatgctggagtgcagtggcatgatctcagctcactgcaacctctgtctcccatttcaagcaattctcctgtatcagcctctccagtagctgggactacaggtgcacaccaccacgcctggctaatttttgtaattttagtagagacagggtttcaccactcttacacactcttggtggagatttaaattagtacatctcctgtggaaaagaatgtggaaatttttcaaaaaactaaaaactaccatatgatccagcaataccactactgggtatctactcaaaggaaaaaaaatcagtatattaaagggataccttaaatcccatgtttattgcagccctattcacaatagcaaaatatggaatcaccctgcgtccatcaatagatgaatgaataaatgaaatgtgatagccgggcacagctgctcacacctgtaatcccagcactttgggaggccaaggtgggtggatcacaaggtcgggagttcaagaccagcctgaccaatatgttgaaaccccatctctactaaaaatacaaaacttagccgggcgcagtggcaggtgcctgtaatcccagctactcaggaggctgaggcaggagaatcacttgaacctggggggcagaggttgtaatgagccaccactgtactccagcctgggtaacagagggagactctgtctcataaataaataaataaataaaatgtgatatgtatacataatggaatactatttgaccataaaaaagaatgaaataatgttatttgcagcaatgtagagggaactggaggtcattaagtgaaataagccaggcacagaaagacacatatcacatattctcactcacatttgggagatgtaaaaaaaaagtcactcatggaggtatacagtagaacaataatactagatgctaggaggagtgtttgtgaggggatgaagaaagactgggtacacaacacacagttagaaggaataagctctaatgttcaatagcagagtagagagatcacaattaacaatgtatatttcaaaatagctagaagagaggacttgaaatgttcccaatacacataaatgataaatactcgaggtgatggataccccaaataccctgacttgagcatcccacagtctatgaatgtaagaaaatgtcacatctggctggatgcagtggctcatgcctgtaatcccaacactttgggaggctgagcggggaggatcacttgagcccaggagtttgagaccagcctgggcaacaaaatgagacccccgtttctatttacatttttttaaaaagaaaatatcacatgttccccatgaatatgtataaacattatcaatataaaaatatttaaaaaaattttaaagacacataggctaaaagtgaagggatggaagaaattattctatgcaactggtaaccaaagagagcagggtggctataattatatcagacaaaatagactttatgttgaaactgttattagagacagaaaaggtcattatataataataaaagggtctattcaacaggaagacataaagattgtaaatatatacgcacccaacatcagagcactgaaatacataaaacaaatattgacagagctaaagggagaaattgacagcaatgctatcataggaggaaactttaatgcctcaatttcaataatgaatagagcactcaagcagaaaatcaatttttaaaaacccgacttgtgcactctagcctaatggaccccacaaacatatctataactttccacccagcagaagaagaattagcccatgcaacaaattcttttcaaacacacttggaatatcctccaggacagatcacatgttgggtcacaaaacaagtcttaagaatttaagaagattgaaatcataccaattatctcctcagaccatgtggaatcaaactagaaataataacagcaataaataaggaaaatccacaaacacatagtaactaaacaacacacttttgaacaccagttgggtgaaagaggaaatcaaaaaggaatttaaaaaataccttgagacaaatgaaaacaagaatacaacataccaaaatttatgggatgcagcaaaagcagtcctaagagaaatgtttatagggataaatgtctacatttaaaaagaagaaatatctcaaacaacctaagtttacaactcgaggaagtagaaaaaaaaactaaaagcaaagctagcagaaagaaaaaaaataataaagattagaatggaaataaatggaataggctgggcacagtggctcactcctgtaatcccgacagtttgggaggccgaggtgggcagatcacttgaggtcaggagttcaagaccagcccggccaacatggtgaaaccctgtctttactaaaaatacaaaaattagctggttgtggtggtgggcgactgtaatcccagctactcaggaggctgaggaagaactgcttgaacccaggaggtggaggttgcagtgagccaatctcgccatgcactccagcctcagcgatagagcaagactccatctcaaaaaaaaagaaataaaatagagagcagaaaaaccataaagaaaaatcagcaaaactaacagttgtgtttttgttaaagataagcaaaatcaacaatcccttacgtagactaagaaaaaaaatagagaagactcaaagaaaatcagaaatgaaataggagacattaccttgaatgacaaagaaataaaaatgatcataagtgactattataaacaagtatacatcaacaaattagaaaatatagtacagtggcccccaacctttttggcaccagggactggtttcatggaagacaatttttccacagaccagggtgataaggggacaggggaggatggtttcaggatgaaactgttccacctcagatcatcagattctcataaggagcgggcaacctagatcccttgcatgcagagttcactatagggttcatgctcctgagaatctaatgctgccactgatctgacaggaagtggagctcaggcagtaatgttcgctctcctcctgctgtgcagcccagttcctaacaggccatggactggtactggtccatggcccagggattgtgaacccggatataggagaaatagataaattcctagaaacatacaactttccaagatggaatccggaagaaataaaaagtcttacttctcctgggacccctggaatcatggcatattctgaacaaggggagaaacatattgagcagaggctcttagaggagaaaccacctggaatgactcatgagaagatggcatctggagtagaggctattactggcccaatacagaacactgttcactgggacttcccttacaccagcatccagtatgctcccacccccatgcacccttcggaggtgcatgctcagcaaggggtataagagtaccactggcaaaacaatgcttaatccatctggcagtcatcctggccctgtgttttcctacatcagggctaaaggaggccaaggggtggcagagtgtcagaactgattcattattccaaagtgcacttttgcctcactttcgaggcattgagactttgctgtggacagtcttatactgtctcctcgcagggcatggccttctctgtgccttgtccttgttatgcatcctcctgtatccctcacaaaggaagagatggagctgtttgctaatccactttcttcttgagcagttcatgttgtatgaataatagcaaaacctctaggtcacatgtgacttgtttaaatactgtacatacataccttggtgtgtgtgtatatatatatatacacacacacacacacacacacatatatacatatacatatatatatatatatatatatatataaaatacacacttgtacatgaaactcgtagaattcaaaccacatcccatatgggctctgaatatcctaggtagtgcttggtgcaagagagaagtttgttggcatataattcaccttatcacccctgtctctttgtcataattctgctaaattattgagcctccatcacatccagtttcttatggacattctagtctcactcagaactgactcaaagttcgacacacactttttaaaaattcctcctaattgaaactgtatatcctttgaccaacatctctccaaccaacaccacccctgacaggccctggtaaccacaattctacgctctacttctatgagttcaacttttttagattccacatataagtgagattacacagtatttgtctttctatgcctggcttacttcacttaacataatgttctccaggttcatccttgttgcaaacaacatgatttcctcctttttaaagtctgaatactattccattatatatatgccatttcctttctccactcatcctttgatgaacacttagattgcttccacatcttgactattgtgaatagcgctgcattaaacatgggagcatagatatctcttaaacatattgattttatttcctttggatattgatatagtttaaatgtgtgtccctgcccaaatctcatattgaaatgtaatccccaatgttggaggtggggcctggtgggaggtgattggatcatgagggtggagtcctcatgaatgatttagcaccatccctcttagtaccatcctcccaatagtgagttctcatgagatctggttgtttaaaagtgtatagcacctccccctcactctcttgctcccgcttttgacatatgacatgcctactccccctctgccttccactatgactggaaacttcctgaggcctccccagaagcaggtgccattatacttcctgtacagcctgcagaactgtgagccaattaaacctctttacttagaaattgcctagtctcaggtatttctttatagcaattcgagaatggactaacagaaaattggtaccgagaagttgggcattgctgtaaagatgcctgaaaatgtggaagcagctttggaattggataacaggcaaaggttggaagagagttgagtgctcagaagataggaagatgaaggaaagtttggagcttcttagagactggttaaatggttgtgactaaaatgctgatagtgataacggacaatgaagtccaggctgccaaggtctcagatagaaattaggaacttattgggaactggagaaaaggtcccttttgctatgccttagcaaagagcttggctgcattgtgtccacaccctagggatctacggaagtttgaacttgagagtgatgacctagggtatctggcagaagaaatgcctaaataacaaagcattcaagatatggcctggctgcttgtaaccacctatgctaagatgtgggagcaaagaaatgacttaaagctggaacttatatgtaaaaggtaagcagagtgtaaaagtttggaaactttgcactggccatgtggtagaaaagaaaagttcattttcagaagaattcaagaaagtttctgagcaaccatttgctagagaaatttgcctaactaaaaatgaggcaagtgcagatagccaagaaatgggaaacaggcctctaaggcatttcagagatctaagaggcagcccctcccatcacaagccccgaggcctaggaggacagaatggtttcatgggccagaattgacctgtgcagcctcaggacatgtctccctgcatcctggcttctccaactccagctgtgacttaaaagggcccaggtacagctcagactgcagctccaaaggttgcaagccataagtcttggtggtttccacatggtcttaagcctgcaggtgcacagagtgtgaataaggcttgggagcctccatctagatttcagaggatatgtggaaaagccaaggtgtccaggcagaagcctgctgcaggggctaagccttgacagaaaacctctactagagcagtgcaaaaaggaaatgtggggttggaaccctcacacagagtacacactggggcactgactagtggagctatgagaagagggccaccatcttccagatcccagaatggtagatcagagcagcctctgagcctgaacccggcaaagccacaggggaagaaatacccaaggctggaagcccacctcttaaattggtgtgccctggacatgggacatggaatcaaagattattctggagctttaagatgtaatgattgccctactgggttctgatcttgcatagggcctgtagcctctttcttttagccaatttctcccttttggaacaggaatgtctatctaatgcttgtacccccattttatcttggaagtaactaacttgtttttgatcttacaggctcataggaggaaagaacttgccttgtctcagatgagacttcagactttggacttttgagttaatgctggaattagttaagactctgggggactgctgggaaggcaagattgtattttgaaatgtgagaaggccaggagatttgagaggggccagaggcagaatgacattgtttagatgtgtatcccaacccaaatctcatactgaaatgtaatccccaatataagaagtggggactggtgggaggtgattggatcatgggcgcagattcctcatgaatggcttagcagccctttgtttccatcctcataatagtgagttcttatgagatctggacatttaaacgtgtgtaccatctccctcctcactctcttgctcctgctttcaccatgtgatgtgcctgctcccattttgccttccaccatgattggaaacttcctgaggcctgctcaaaagcagatgccactatgcttcccgtacagcctgcagaactgtgagccaattcaacatcttttcttataagttaccgagtctcgggttttctttatagcaatgcaagaatggactgatacggatatatacagatatatacagatatatatagtgggatgactgggtcatatagtggttatatttttaatttgagaaaactccggatattttctatgtttgtactaatttacatttccacaaatagtgtacaagtgttcccttatatccataccctcaccaacccttgtcgtcttttgtctctttgattacagctattctaacactgtgaggtggtatctcagtgtggttttaatttgcatttctctgatgattagtaatgttgagcattttttcatatggacactttttttttttttttttaaagatggagtctcactctgtcacccaggctggagtgcagtggcgcgatctaggctcactgcaaccttcgcctcctgggttcaagcaattctcctgcctcagcctcctgagtggctgggattacaggacccaccacgcaccaccacacccagctaatttttgtatttttttagtagagacagggtttcaccacgttggtcaggctggtctcaaactcctgacctcacgatccgcccacctcggcctcccaaagtgctgggattataggcataagccaccgtgcccagccttatattgacacatttttaagggatttgggggggggcaggggttctttgcaacaatgtaaacatccagtccctcatcaaactttcaattttttttcacgtactaatttatatcagtttggaattatgattccctctgttatttaatgggttttaatctataactagcattatttattttgatgctcaaaccatgtcaagtttggtcagtggaagtcccttcaatctggtttccatgtcctttgaacacgtccccaccattctttgagcactgccttactttcaagcacaagatgttccaagttcattctgaactttcccttccccagctctggaatctgccatttctccatggagccttgctcctttcagtggagcatggtatttaggaaccaagggctgactgcctaatgtgctttccaagtataatttcctcagtccaagcttttcaaattgatctgccaaagacccattgccaaagatccattgccagaatataagagtggaaggaaattcttaatattttttgaaagttactattattttcatttttctctttgtaaaaaattcatttaattcaatataaaaagacaaaaatctttggcacataaatcgcaactctctgatgcaaatgtttaaataaagctgatactccaagaagacgcaacatattctctttatcccacagacatataggcctatggttgcaaacttttatacacacacagagtcacaattccactggcacccgtgatgttccacatccagattttccaaatcacacattctcatcttcacatagccttgccggcaaccacacggcatagtaccacattgttacgtcaagcacagccagtctaccacagagcctgtcgtcccattgaccaaagtcacaaaaatcacagccccgggtatttactgtggttttctccagtcagatcccttcactcactacacactgactcacactcaaattacacacacgcggaaacacaacccgccagagccagagaggttccgtcggtcccgcaaccctcacagtgccacacacacgcgctcacaaggcaaatacaaatggccaggcactcattctttacaatacacatattaagcgcctattatgtactacacgccgggactacctcaagaggtgaaacaaacaaaatcctgcctggcggagctatcgcccagtcccgcacgcactcggcctcagggtcacactcggcggtcccacgctcaagtggcccggccagtggcccagaggcgtctgttctcctcctcagcttcctgcgtgggttcctggtaagtgagtcgaacccgccggatgcgcgcgcgcctgcgcctccgcccaaaaggatcagtttccggctgtggactacatttcccagaagccccttgggcagtgttgcctggaccccaagggccctttacattgcgttcttaacggttcagtcaccttaaccgttattattcacttgcgggcgagaagtccgagctaggtgaggcggaacgggactcttacgagtaggactggggatagaactgccgcccaaagtgaggcgctccagggcccagacctggcgtgtcgtgcccgcagggagcctcaggcctgtgcgtgcttggggagcggagaagggaaattgtgtgacaaaatgtggcagacggtgtatgtgtgtgtgtgcgcgcgacggggcgcctgtcaggaccgggttgggcgggtgtgggtgcgggtgtgaggctgagacaggtgcctggctctctggtgtgtgtcactgaccctctaccctcctcacggcctcggtgtttgcacacagcagtgtccccaagagggaagtcaaatatcgagctctgggatgaaggttcccagcaagaaggtacagacctgggttggcgattggacttttgaattagaagtgtccctaaaacagactcctgggacgacaggttggaagactgcgcagttggagccgctgtgtgggcagctgcatgtttcagaaccactgcattcccatacctttgatctagaaacctggtgtgagttcagagacagatcccagcctcactctcacacagctgttatgtgcgtgaggtcagcacagatgtggcgctggaggggatattctaggtcggtctgtgctcttaagaaaggcctgctgtctcatgattatttttcttcccccattctgctattcatcaaaacagggatcctgaaaaggagggaacaattgttgtagcaggtctaaaagttcaggtccaggtaagtttatatttcctttttattcataaaatggaaatcacacattctaatcctcacacagccttgcctgcacccagtcatacggcgtggtaccacactgctatgtcaagcacagccacaatctaccacagagcctgtcacctcattgctcacagtcacaaaaatcacatccccaggtactttctgtagctttcatttgcatttttccctttgaagaagttcatttgattcaatctaaaaagactaaattatttgtcacataaattgcaactctctggtctatatctttaagtaaatctttaaataaatgcataaaatgtttttgtttttaggaaatggaaacattgctttgcttttcctgaattgtccagtgacctatcccaggccttcctttccagtgaacaatggaccatgcaggtggaccctcctcttcacgggcctccaaatgactttctcatttttcaaatcattcctctgcactcactttctataatggtagagaaatgcatatcctggagtctaaagttaaaactttgttttattgagattaatgtttaggtagaatcacatcatccatcttctccaatcttctccaaagacctcagttttaaaatatgacaggattagagatgacctgactagtgtcagtaagcaagtgataatggtcgcctgcttttaaggcttttagaagtgggaatgtgattggaagtccaagcatagaaatctgtgtgaacatgagcagggatttttttccaaggaatccatgagttgagatttatttttatacagagttagtcataagaataaaaagtacatatgagtaaagtaatagtcatagtgatgaagaataatacgcaatttttttttctttttttgagaaggagtctcgctgtgtcacccaggctggagtgcaatggcatgaactcggcttactgcagcctctgcctcctgggttcaagtgattctcctgcctcagcctcccaggtagctgggattacaggcgcctgccaccatgcctggctaatttttgtatttttagtcgagacagggtttcaccacgttggccacgctggtctggaactcctgacctcaggtgattcacttgccttggcctcccaaagtgctgggattacaggcatgaaccaccgcacccagccgcaaattttaaattttatatgaatctcactaatattaggatttaaagacatttaacaagcattatatctaaattaacatttcaactgattatttgctggagaagtagaggagaaccaaacactcttctgtctgctttgttcaaattttcttattcagtctgcagacactgttcacctggcttgtgtattaagagaagaatcttaacagtgaaaaggtcttgttgaattgaagaagaatgttcaagaactggcaggcatttatttataatggtcatgctgttttcctattgtttgcatacatgtcaaaccaatttgcttctgatgtgttaaaacattttattttataattggatatagatctattgtatacttctggttatagaattaatattcaccttttataaattatttagttactcattatattacataaggcacttataaagaagaaagttaaaatagccccagcatcactattaacactttggggagctatattttagcaagatttttttttttttttgacagagtctcgttctgttgcccaggctggagtgcagtgatgtgatcttggcttactgcaacctccatctcccaggttcaagaaattctcctgcctcagcctcccgagtagctgggattacaggcgcctgctaccacgcccagctaattttttgtatttttaatagagatggggtttcgccatgttggccaagctggtctcaaactcctgacctcaggtgatccacccacctcggcctcccaaagtgctgggattacaggtgtgagccaccatgcccgacctatttcagcaagatttttcagcacacttgtatgtatgtgtgtgtgtatgtgtgtgcgcacagcacctgcacttttcttcctgcagaatagaaattgcactaactgattattcaaaggacacaagactttccagcttctagttagaaaaactaattctccctaaccatagctttcttataactctgtgcacatagggagaagaggaaaacaccaatgaatcctgctaagtttgattaacctttgagaaatttacaccttttagggttatataaaccaatcaaggataattaatatgacataatttatcaagtaagatagttcttcaggattatactctttttttagatttttaaggttgcttttacaggacatagcaatactcttatcttggttaggtttttttcagggttccattatgcaaataacattttctaggacagatttataacagtagaaaacagaataagggtgggcatggtggctcaagcctgtaatcccagcactttgggaggcccaggcaggtggatcacgaggtcaggagttcaagaccagcctggacaagatggtggaaccccatctctactaaaaatacgaaaattagccggctgtggtggcatgcgcttgtaatcccagctgcttgggaggctgaggcagagaattgcttgaacccaggaggttgcagtgagccgagatagcaccactgccctccaggctgggcgacagagtgagactctgtctcaaaaaaaaaaaaaaaaaagaaaaagaaaaagaaaacagaataagatagtaacagctacaaatattcatgtaaatctttccatatagaacaggagaacaagattgaacctcatattaaaattatctattgaatgccttattacagcagttcccaacctttttggcaccaggactggtttcatggaggaccgttttttcacagacagggagagggagatggtttcaggatgattcaagcacattacatttattgtgcattttattcccattattattacattataacacgtaattaaataattatacaactcaccctaatgtggaatcagtgggagacctgagcttgttttcctgcaactagatggtctcatcttggggtgatgggaggcaatgacagatcatcaggcattagattctcataaggagcacgcagcctagatccctcacatggtcagttcataatagggttcgcactcctatgaaaatctaatgctgcagctgatctgacaggaggcagagatcaagcggttaatgctagcaatggggagtagctgtaaatacagatgaagcttcccttgctggcctgctgctcaccttctgctgtgtggcacagttcctaacaggccgtggtccagtgtcagtcagtgacctgggggttggggacccctgccttaattagattattttagctagttttatgttgaagaatgatgtcccccctttggtagttgcaagaacaaaagaggatatttcttttttttttttttaaatgaagtctcactctgttgccctggctggagtgctgtggctcaatctcagctcattgcaacctctgcctcccaggttcaagtaattcttctgcccagcctccagagtagctgggattacaggtacccactaccacacctggctaatttttgtatttttagtagagacggggtttcaccatgttggtcaggctggtcttgaactcctgacctcaggtgatccacccacctcagcctcccaaagtgctgggattacaagtgtgagccaccgcgctctaccaagaagagatttcttgattatctttctgggagtctgttttacgaatgttgttaattaaaaataattgcatcttcaaggctcagctctgaaatacttaaaatatcattattaaaaaatgggcatgagactcaaactttactagaaaaaatgaaataatataaaatgattttatttaatagcagtggaacaaaggacataatatcctctattttaataatactggctaacttttattacgtaattatgtatcattaagtgggatgtatgtattatctcaatcttcgtgacaaccctatgagataggtgctgtttttatccctaatttaccaacaaactaactgaaaagtatgtagctgtcagactaagattcacattctgaaaatctgacaacagagtttgtgttattaatgacaacgttataaccctgcccataatggcatatgctcctttaatttgcctgtatcagtcagtaactcatcattgatgtcttcctccaaaaataaatatggaccaatatagttagtattagtaaggccttagtgtgccatcataactgaccatagtttatttaacctgctgcctactatagctattagtatttttaatatttgattattataagttgttatatgataaatgtcttatgtatatgtcttaatatgctttaatagccacttgcaagaaaaaaatgccaaaaattggaattttagtcaaatatcagacataagggctcacagtatactgaatcttgtgttagtaatcagaggaatacaagaactgaaaacacataggtgttactgtacagcagagagtctaaaatcagaatagactgaataagtataaggtagaagataataaaaaacagtaaagaaattcaggtcacaggccttgggagttcataggaaggagatgtccagtgctgtccaatagaactttccatgatgatggatttgttctatgttttccagtgtggtagctgctcaccacatgtggctaataagcacctgaaatatggctagtgtgactgggaaactaacttttttttttttttttgtcgagatagagtctcactctgtcgcccaggctggagtacagtggcgagatctcagctcacagcagcctctgcctcccgggtggaagcgattttcctgcctcagcttcctgattagctgggaccacaggcatcagccaccatgcccagctaatttttgtatttttagtagagacaggggttcactatattggccaggctggtctcaaactcctgacctcaaaagatccgcccaccttggcctcccaaagtcctgggattgcaggcgtgagccgccgtgcccggcctgaacttttaattttatttaaaatttgatttaacttttttttttttttttttttgagacagagtctcgctctgtcgcccaggctggagtgcagtggtgcaatctcggctcactgcaagctctgcctcccaggttcacaccattctcctacctcagcctcccgagtagctgggactacaggcgcctgccaccacgcctggctaattttttttgtatttttagtagagacggggtttcacgttgttagccaggatgatcttgatctactgacctcgtgatctgcctgcctcggcctcccaaagtgctgggattacaggcgtgagccaccgtgcccagcttaaaatttgatttaaataaccatatttgtattgaacagcacaatttcataccttaagtttttattgtaatgattcaaagtgaggctaatgggtttttattgttagattcaaaaacaaagtttttattgttagattcaaagtgaggctaatgggacaagattattcagcagcagtttggaggatattgtggctgaaaggaaaatttcagagcacaaactgtcaatacgtttgtcaggagtacatgaaaagccacttcactgtgaccagcattcatatgtataagacattgcaatatattagcatacatggacatatgtgaaaaatcaaaagaattgcttccaatgttatgagctaaagggaaaaaagacattcagtaaaaatataacagctgttggccaggcacagtggctcatgcctgcaataccagcactttgggaggctgaagagggcagatcacctgaggtcaggagttcgaaaccagcctggccaacatggcgaaaccctgtctctactaaaaataccaaaattagccgggcgcagtggtgggcgcctgtaatcccagcgactcgggagcctgaggcaggagaatcacttgaacctaggaggcggagtctacagtgagctgagattgtgtcattacactccagcctgggtgacagagtgagactctatctcaaaaaaatatatatatataaatatataaatatatttatatgtatttatatataatatataaatatatatataactatattaatatataaatatatattatatatataactatattaatatatatatatatcagctgtttttagattatcttaagcttttccttcaagttgaagagaagatcgttcaacaaaggaaaggctttctcttatcaaaatgaaaaataagtacatatgtatgccggtgtgtatattttaaatttttattttatttttttgagatgagtctcactcccgtcgcacaggctggactacagtggcacagtctcggctcactgcaacctccacctcctgggttcaagtgattctccttcctcagcctcccaagtagctgggattacaggcatgtgccaccacacccagctaatttttgtattttttagtggagatggggttttgccatgttcgccaggctggtctcgcactcctaacctcaggtgatccagccacctcggcctcccagcgtgctaggattacaggcgtgagccaccgtgcccagcctaaattaatttttaaagttacagattatactttaaaaatatatcaagtaatgtcatgcagcttggcagtgctgacatatagatatatacatttttaaacttttttctctctctcagtttctgcctgtccttcgttctttctttatgtatgtgtgtgtgtgtgtatgttttcacaaatgtaattatattgtacattctgggttttaaccttattttttaatttagaacatatcttggatatttcccaaatcctttaaatattttctccaatttagtatagtatttaatatctacttaatattctgtttcatagatgatctgtaacttatctaaccagtcagctattgctggactcagaatgctgaattctacctccctgcatgcatcttttttatttttgctttttccagtaagccttttgcacccctaacctgcatgcatctttttttttttttttttttttttttttgagacagagtcttgctctgtcgcccaggttggagtgcagtggcgcgatttcagctcactgcaacctctgcctcccgggttcaagcgattctcctgccttaggctcctaagcagctgggattacaggcatgtgccaccatgcctagctaattttttttgtatttttagtagagatggtttcaccatgttggccaggctggtttcgaactcctgacctcaaatgatctgcccgccttggtctctcaaagtgctaggattacaggtgtgagccaccgcgcccggcctaacctgcatgcatcttaatacacatcatttgctttgggtagagtcccaaaattaggtttggatggtaaaagtctctcacatccttctacatgccatgttttaaggtcctacaaatctgtagcatttacacagtattcatttccctgtgatgttgctcatctggcatattattaatcttttaagtctgccattctaataattgtcaactggtatttccttaattaggatctgcttcattgtattgaaatttaataagttcggtggatgatatgctgctatttttagtgaattgctcatgcttaagtttcatttgaaaacattctgggcttcagaggcaaaagccagagttgagagcaagaccctgtctccaaaaaaaaaaaaaagatagtttgctttataattagagaaatgtggattcagaacacagctctgcctcttactaactgtgaatttgggcaagttacattattttaagccctcattacctcatctgttggatggagataaatgcattgcatggttaaatgttaatatgataaaggacccatcatgcagaagatcctaaaaatagctacttttgttgtcatcacctggcaaccgtgggcatgaatttacaccaccccagccttgatattgagatatcttccccagtttatatgcgcagaatggtggggttggaagtagaaatgatggcataacaggatcttattaacttaagtcattttaggagttttgacacacatctggtctcagagtcacttgttcttccccccagccccggtttctctggattctgtgcttctccatggaggaaactcaaggagaactgacaagttcttgtggttctaaaaccatggccaatgtaagtttgtgtttttcttccttgaaatactgtgtttttaaattcatgtgatcattgaagtctcgttatcttgagacttccttcctaagacaaccctgttgtggaacctgctccctagttactccctagttacagtgaaggatagtgccaaatagcctagtgtcttcctcatttgctcctgttttctcttatctgtgctcaaacattgtcttccatgtcagcctcagaggcagaggtcagatcccatgcattgagaggcttagaggactaggctggagtatgattggggcctgcatatggtagtttcaggcatctagccagggaatttccaagggatgaataagaaaacaaaagtcaattttgtggttgaggaggttgtgctggtctccagtgacatcagtgtcattgtggatacgtcagcatcctctggcttaggaacaaagcaagtattcctgaggtatggcaggggtagcaggtaggaagatcctccaatccctaatgatggctggaaataggctctgatccctaatgatgggtggaaacagaactggggaagaccttaaacattttggccaacctaaatgcctaagaataaaagaagaattagtctgctgtatctttaagatggatgatattattagctagccaataaatatactaactgaagacttttcttatgaggttattttgcatcatgatgaaccagagttttaacgaaatcacgtaatgtcagtcaaatcctgttttctaagagagattttagagtactttttggtgaaaaaattctttttccaaaaattttttgaagggaagagaggatgatggaacttgcatttattcagaactttaactgcaggcacataatgggcaatgtgcttatttatgctatttcacttaatttgcatcaacaatattctttaaaagcgtatgaacactttatttcagaaatattaatttctttattcttttacacacattgcaggcttgagccccagtttatttgcttactatgttgcttctttcctgcaaagcagttttccatcttgaaaatacatttaatttttttttaatacataggcttgtcatttcaggtatctttggcatttagggatgtgtccatagacctctcccaagaggagtgggagtgcctggacgctgtgcagagggacttgtacaaggatgtgatgttggagaactacagcaacctggtctcactgggtaaggtatctttcgaaatcgtttacaatctgttttctggagtatcagctttctccactgtcaaactttagaactctgttttaagaggctgactgacacccctatttctaaagtcatagtttcagcagtgttggggtggaaatgggcacctgtgttaagcaacttcacctttctgaccctcagtgacattcactcctccctctgacttttcctgtcattgcttgcttttctaaataatttccaggtttgagttgtgtgacatcagatttcatataatgcatatactcagaattcctatagctgttctgtgttaatatctgaccttcctacaagacaacagctagtctcagaattctagttttccttgattatcaaaagaacctccatggattatacagtggtggattgagttaacaatagtcatttaaaactcaagccaacacaccccatcctaaaggagacatattctccttaacctgctttgcggttgaaagttaaagtctgtgaattgacattttctgttgaaggaatatctgaggaagaacctggaaatattttaggaaacttagtatatttctcctaggaaaatagtaccaacaacaaaataatactatatactgggcatattatatgcctttgcatatattaattcatttaattctcaccacagccctaagaagtcggtaatatcagccccattttgcatttgataaaagtgaatatgtgcagggtaactttgaaggtcacacagctggtaggtggcagaagatttgaacccaggccatagggctccagagggtgtgctcactggtcccctttctatactgccgttaacagcaaagcagaccttttcgctctctcaccttgtctctttagtcctgtaattgtgagtccatgttaacgtgaatattcttagatggcctttttcttctttactgtcatggcattgtctagtaccattttcacctgcagtttcttacaaatgtaaccaagtctgaattgtcatttcaaggttatggttgtttttgtttttttctataacatgtgtcatttcttttctcatgagcaggatataccattcctaagccagatgtgattactttattggagcaagagaaagagccctggatagtaatgagggaagggacaaggaattggttcacaggtgagtgacagcaaattaggcgggagggtgctatcacaagttatgacccatgatgtcagggaggaggcacagcactgagttgtttggaaagctcccttcaaaggcctgaggcctgtggaaaaaggactgatacctgggaagcattcagattctctctacattagctaccaaaggaactttacccaatttgccatactccttgtttctcttctctcgtatttctctcctctttcaaagtggggctgctttctttcttccccattgatgaccattttacgtgtgtttccaggcctcctttaacattttgatttatattcatttctccattgtccaagttttattcatcaaatatttcccatttacctaacctaagccaggcactgtgctagagtttaggcactactgatagacactcttgtcacagagatgttgatattatagtaagggaaacatgttgtcaatacgtaaacagataataatcaagttttcatatgtgttgtgaagaaagttaagtagagtaaggagctagagtgttggggagttagtagggctaatttagataagatcaggaaaaggccattttgaggtgatgatatttgaaccagagacataaagtaaggtctcaggccatgtgagtattgaggaagaacattacaagcagaaaaagctgcaagtgcaaaggttctgagatgaagaaccatctgtgtttattcccaaagtaaattatgccacctgatgtgaacattcttgtacaattgtttttgtgttcagatgttttcatttctcttgggttttcatttttcttgggaatatatggaagtggaatttctgggtcataggacaagtgtattttcttaatcatatttattgaggtataatttatatagtataaaatgtactcattttaagtgtcaatttttataacattttaaaacagttttattgacatataattagcatacaataaactgcacacatttaaagtataaaatttgctaagttgccctgtatattgtgaaaccatttcaaaatcaaaataataaacatatccatcacctccaaaagaaatccctccctcatgtccctctctacccactgcccaggtaagcactgatcatctctctgtcactataacttagttttcattttctagaattttgtataatggaattatatggtgatttttttcttccttttttaaaaatatggtgatttttaaaatttagcttcattcactcagcaaaattattttgagattcatccatgttgctatatgtatcagtacttcatttcttttcattgttgagtagtattccattgtatggatgtaccacaatttacttatccatttatgtataaggatggacattgagttatttccagtgtttggctattacagataaagctactggaaactttcatgtaaaattcttggtatagacttatgctttcatttatcttgggtaactgtctggggtagaatgggtagatcatatgataaatatatgtctattttttaagaaactgccacactgtgtttgaaagtggttgtatcagccagtagcagtggcttatgcctgtaatcccagcactttgggaggccgagacaggtggatcactggaggtcaggagttcaagaccagcctggccaacaaggtgaaacttcatctttactaaaaatacaaaaattagccaggcatagtgacaggcatctgtaatcccagctacttgggaggctgaggcaggagaatcacttgaaccctggaggcagaggttgcagtgagccgagattgtgccactgcactccagcctgggtgacagaccaagataatgtctgaaaaaaaaaaaaaaagaagaagaaagtggttgtatctttttactttcccagcagaagtttatgaaaattccagttcttcgacattcttgttagcactttggtatggtcagtcttttaaattttagctttgctaataggtgagtaatggtatctcactgtggttttaattttcattttcctaatgcctaataatcctgagcaactttttattcttaatttatcatccatatatcttctttggtgaagcatctattacagtcttctgctcattctctttgcttctttctttcttttttttgaaacagagtcttgctctgttgcccaggctggaatgcagtggtgcgacctcggctcactgcaacctccgcctcctgggtacaagcaattctcctgccttagcctcctgagtagctgggaccacaggcatgtgccaccatgcccagctaatttttgtatttttagtagagatggggtttcaccacattggccaggctggtctcgaactcctgacctcagatccacctgcctcagcctcccaaagtgctgggcttacaggcgtgagccactatacctggccttctgcccattttctaattgcattggttgtttgctaattattgggttttgagagtcccttatatattctggatgtaagtcctttatcaaatgtatgatctgtaaactcttaacagtgtcttctgaatagcataagctcttaatttgattaagttaatttatcacatttttctcttatggattgtcctttcagtcatatttaagaaatctttgcccaatataaaaagtacaaaaattttctgttttcttctaattttttttttttttgacagagtctcgctctgtcacccaggctggagtgcagtggcacaatctcggctcactgcaacctccacctcccgggttcaagcaattcttctgcctcagcctcccgagtagctaggactacaggtacacgccaccacacccagctaatttttgtatttttagtagagacagggtttcaccatattggccaggctggtctcaaactcctgacctcatgatctgcccaccttagcttttcaaagtgctgggattacaggcgtgagccactgcccccagcttttctagaaattttatggttttagatttttacatttgtatacctattgtacacaaactcttccagaaactttaagataagggaatacttccaaactcactcttcaagtccagcattaccctgataccaaaaccagacaaaggcattataagaaaagaaatctataagtcagtatctttcatgtacacaaatgcaaaaattctagactaagttttagccatttgaatccaacaatttatgaaaagaatagtagttactggccattcttggcattccttggcttgcagacgcatcactgcagtctctgcctccatcttcatggcaccctctcttgatctccctatgcctcgctcttataagtacacctgttattggatttagggcccaccctttttccatattaggtcacattcacaggcactgggagttaggaacatgtcttttctgggggccacaattcaacctactacatctgagaataaaggcgtttatttttctcctttctaaagcctgtgttcttcaccttgccttactctactagccaggacctgcagtgtaattcttgactagcaatgagtttgaggatctgtgaatgagtaatgataaaacaactgatgctcaccaaataaaatatctcagtacttgagttgggacagagacaaagagaaggaacagtagccacacacacagggcaaatgtaaacagttttggagatgcctaatgttcaaggtaacaataggtaattggaaaatgatgaaatacaaaaatgacttttccatttatacttttgattgagcaattttggatgtatctttgttccctttcagaagggaagtgatccaggaaagagcatatttaattgctgtactaggatgagattggaatcagggagatatattcataactatgttgtaatttggggaaattaagttattatacttagctgccctctcagtgacttgtttgtaatatttacagaggtggtttgcagaggtcttccaaataagaaaggggtttttatcaatggtaatatgtttgggttttattctagggggaacgagaaactctattctaaagggaaaagaattaggtacagattttcaaaatgatctccatcaaagccatttgatgaaaaagattttaaatgcacatatccaggacttgctcctatagattttgattttgtctggtttggtgcctgaagaacagtatatgtaagaaatttccctaaatccatcctaaataagcggatcactgatttaccctattatcctattcacctattttaccattctttttttttttttttgagacagagtctcgctttgtcacccagcctggagtgcagtggcacaatcttggctcactgcaagctccacctcctgggttcacgccattctcctgcctcagcctcccgagtagctgggactacaggcacccgccaccacgcctggctaattttttgtatttttagtagagacggggtttcaccatgttagccgggatggtctcgatctcctgacttcatgatccacctgcctcagcctcccaaagtgctgggattacaggcacgagccaccgcacccggcctattttacaattcttaaaagtcacatcattttctgaggtattttgccttcttttaaattgcactacaataatttagagttctctaagccaggaaccagcaaactatagcccatgagccaaatagctcactgcctgtttttgcatggctcttaagttacaactgttttttccatttttttaatggttgaaaaaatcaagattttgtttcatgtaaacactttttgaaatttaaatttcagtgtccataagtcaagtgttattataacacagccacacttattatcatctgtggctacttttgtgctgtaataacagagctaagtaattgtgacagagaccatatgcctcccaaggcctaacaccttcactatctggtcttttaaagaagaagtttgttgaatcctgctctaaaccatttatttctaatgtatgttatttctgtttatcttttatttctactatgaggtacaacccccatccctgccccaacacagaaaaatagcattatagcatttgtttactctttgcttttttttttttttttttttgcagatttggaatacaagtatattaccaagaatttgctttcagaaaagaatgtttgcaaaatctatttatctcaattgcagacaggggaaaaaagtaaaaacaccatccatgaggacaccattttcagaaatggtttgcagtgtaaacatgaatttgagagacaagagagacatcagatgggatgcgttagtcaaatgctaatccaaaaacaaatatctcatcctctacatccaaaaattcatgctagagagaaatcatatgaatgtaaggaatgtagaaaggcctttagacaacagtcataccttattcaacatctgagaattcacactggtgagagaccctataaatgtatggaatgtggaaaggccttttgtcgagtgggagaccttagagtacatcacacaatccatgctggggagagaccctatgaatgtaaagaatgtgggaaggcctttagacttcattatcaccttactgaacatcagagaatacattctggtgtgaaaccctacgagtgtaaggaatgtgggaaagcctttagtcgtgttagagaccttagagtacatcagacaattcatgctggagagagaccttatgaatgtaaagaatgtgggaaggcctttagacttcattatcaactaactgaacatcaaagaattcatactggtgagaggccttatgaatgtaaggtttgtggcaagacctttagggtacaacgacatattagtcaacatcagaaaattcatactggtgtcaaaccctataaatgtaatgaatgtgggaaggcctttagtcatggctcataccttgttcaacatcagaaaattcatactggtgaaaaaccctacgaatgtaaagaatgtggtaagtcctttagttttcatgcagaacttgctcgacatcgtagaattcatactggtgagaaaccctatgaatgtagagaatgtggaaaagcctttcgtcttcaaacggaacttactcggcatcatagaactcatactggtgagaaaccctatgaatgtaaggaatgtgggaaggcctttatttgtggttatcaacttactttacatctgagaactcacaccggtgagattccctatgaatgtaaggaatgtggaaaaaccttcagtagtcgctatcatctcactcaacactacagaattcatactggtgagaaaccctacatatgtaacgaatgtggaaaagcctttcgtcttcaaggagaacttacccgacatcacagaattcatacatgtgagaaaccctatgaatgtaaggaatgtgggaaggcttttattcatagcaatcaatttatttcacaccagcgaattcacaccagtgagagcacctacatatgtaaagaatgtgggaagatttttagtcgtcgctataatcttactcaacattttaaaattcatactggtgaaaaaccctacatatgtaatgaatgtgggaaagcctttcgatttcaaacagaacttactcagcatcacagaattcatactggtgaaaaaccctataaatgtacagaatgtgggaaggcctttattcgtagcactcatctcacgcaacatcacagaattcatactggtgagaaaccctacgaatgtacggaatgtgggaagacgtttagtcggcactatcatcttactcaacatcacagaggccatactggtgagaagccctacatatgtaatgaatgtgggaatgcttttatttgcagttatcgacttacattacatcaaagaattcacactggtgagcttccatatgaatgtaaggaatgtggaaagacctttagtcgtcggtatcatcttactcaacattttagacttcatactggtgagaaaccttatagctgtaaagaatgtgggaatgcctttcgtcttcaagcagaacttactcgacatcacatagttcacacgggtgagaaaccctataaatgtaaagaatgtgggaaagccttcagtgttaattcagaacttactcgacatcacagaattcatactggtgaaaaaccctatcaatgtaaagaatgtggaaaagcctttattcgtagtgatcaacttactttacatcagagaaatcatattagtgaggaagtcctatgcataatgtaaagagaatacgatggcctttagaaaatgccctttagcagagaatttgtaatttaagaaattttctgtttgttacggaacatgtgggaatcccttttacttcatgctcacaatttatcagaaattatttcgtatgttaaagagtcgaaagactatagcatcactcagtccctgttagactttagaagattgatactgatgcactgcatcccaaaccatcaagggccttttcccctacaaactgttgttgaacagtgcttctctaaaatgcaataataatgggccaggtgaagtggctcacacctgtaatcccagcactgtggaaagacaggagttcgaaaccagcctgggcaacatagtgagaccctgcctcatggctttagtgagccatgattgtgccactgcactccagcttggtgacagagtgagatcctgtctctaaataaataaataaaatgcgggccaggcacagtggctcacacctgtaatcccagcactatgggaggcccaggtgagcagatcacctgaggtcaggagttcaagaccagcctggccaacatggtgaaaccccttctctactaaaatacacaaattagctaggcattgtggggggtgcctgtaatcccagctactcaggaggctgaggcaggaaaattgcatgaacctaagtggcagaggttgcagtgagctgagatcgcaccactgcactctagcttgggcaacagagcaagactctgtctcttaaataaataaataaatagattaccagaaaaatgaaaagaaaaaaacagacatacaaaataaaagccccagttttttattatggtatttaactgagttaactctgtcagattgctgcaaacatttctaaatacttgctcttggtatctataacttttgcagagaccagaagcaaacaatttgtgggccagtgtcaacacatggaccacactttatatagcactgtaacggaaaatgattctgttaatgtaatgaacatgggaaagaccagccttggcctatctttatgatatatataaataatataattctcataattccacctctgcctatgtggtgtttggcaaaacatgcccctgtgccttggtttttaaaatggtaataacagtaccacctaatagtatttttgtgaggatgaaatgctaataaaagataaaacctttaaaagagtatttggcacacagcattttatcaataaatattgctttatttttttcattggggatacatttagtacattcatgtgagaggaaggccctgtgggtgtaagaaatttgtaaaaactgtccattacctttcactccttatttagattggaataattaactggagataatatccagtaaaatagattaaacttccatttataaagtcagaacctatctctgaaaattaatgtgagaaagaaatctctagatttgatgggtgtgaagattatgagagtaaagttttgaagactcagggatagctgtaatgcttttttctttttataacccaaaaagcaggtatgtcagtcgctttttctgcccacaatgataaattaaaaacagccactatccatttggaaaacttaaaagaataatgaacagttatgttctatctagattcagcaattgttaatatgttgtcacatttggtttgcttatacataatatttacatattttgctgtagtatttgagtataaattgcagatactataacacatcacatctaagaataaaggctgcctcctacttaattgctatataacaattgtccaacctgtctgtgccccagggcagctttgaatgcagtccaacagaaatttgtaagctgtcttaaaacatgagattttttttgtgattttttttaagctcatccgccattgttagcacattttatgtgtagcccaagataattcttcttccagtgtaacccagggaagccaaaagatttgacccccagtaacttcacacctaaggagattagcaataattccataatctgtaatattcagtctgtgttcatattctcagttgtgttcattcttttcatttgtgtaaacaatgcttttcataggttatttttaaattcaggaaccaaattcatgaattacatttgtgcattgttcgtctcttttaaagtaagaatggcccttccccccacaactttattgcaacattgactttttttttttttttttttttttttttttgagatggagtctctgtcgcccaggctggagtgcagtggtgcgatcttggctcactgcaagctccgcctcccgggttcaggcaattctgcctcagcctccccagtagctgggactacaggcgccttcaaccatgcccggctaattttttgtatttttagtagagacggggtttcaccatgttagccaggacggtctcgatctcctgacctggtgatctgcccgcctcagcctcccaaagtgctgggattacaggcatgagccaccgcacccggccttcccaaagtatttttaaatgtgcttttttatccccagtatttcccattaactggaatttgggattagagacccaattagggacagattaaatattttggcaagaatacttaatgggagaaattttgtatttcaatttgtaacccattaggtggcatacaatgtcattataccactatggtatccttagttcattcacttggtgtagcagaacatacattccaaagatggccacaccaatatatcccattctgcatgttcatcttacaatgtgataccaacactccccaagaggtagagctcatggtccttccttttgaatctggccaggtgggcctgtgtttatggcaggaataacactgtgatttccacgactaagtcataaaaggcaatacagcttctgcctgacccacttgggatgaagcccagccaccatgctatgaagatgccaagtaatcacatagaaaagctaagtaaagctgtcctgattacagctgtaattgaggtaacagccgggatccagcaccaagtgtatgagggtatgagccttcagatgattctaacccttagccttcaggctatcctagctggtgctaagtggagcagagaaaagctttcccccatgagcctgcccaaattgcagatttacgtttaaaatatggcctgttttaagccactaagttttggagtagtttgccacacagcgataggtaactgaaatacttgcttcatatggtaatcaccaggtttctctgttgtagagctaaatatttcttttaatttagtaaacgatctgtagagtagtactttggcatttcggaaatttaaaatctccaataatataatgacactagatcaaaaagaaaatgaaaccataaaggacaatttagaaatgaatggtaagatcagaatttgtgaatgtggccaaacctgtgctcagtgaaaaatcagtaacctgttaatatattcaggaaacaaatattgagggccagcactttgtttctcctgctcaccactctactcccagtgacttaatactgtctctttaacatagtaatcacttataaaactgttaaaagaatgaagaagcattaaactcaagaaactaagggaaaaataagtcaatataagaaagaagggaggatcattaaaaggagttaatgaatttgaaaataaaatagacttattaaggctttgtgaaaaaatattaatacttgattttagtatagctaatcaaaggaaaaagataattacagcattgtgaatgagaattggatgtaagtacagatggaggagatattttttgttttattgaaaatttcaaggaggaagtaatatcaaaatttcactagctctttctacactgatattataatcctgataatacaacagatgaggatagttcttaaaaggcaaaaatgtaggtgagtcattacgaagaaagcagaaattctaaaccatcagcacattcattcaaaaacctagtaaagcaattaagcaaaataatttgtttacttggactgtccagggatagatctgttctagttttccaaattaatgatgggaaaggaagagctgatccagtccaagtatcttcaagatccatgttctcagtttttcttagctttaaatggccaaattgtggcttagattggatatgataatttcctcaatgcttaacactgagcacaatttttcacatatttgaaatcaaggtgtatcttacaatttatggcatctgacaatacttccaaccaggtggcagtcatcaagcagttttgtgaaaagccttcccggtaagaatacaaaagcatctgcaccaaaatatatagatttaatggcatgtaggggtttgcgtgaatatatacagttgaaattcaattcttccttaaaaataattgtaactcatttctttaagactaccatactaccactttcctcaacttggactaatgtccattgtcaaccaaaatgtctgtgatctcatggatccattatgatttgcaactccaggtccattttatgcaaataagacagccataatatatcattgtacaagtcatttactatctaattatatcattgctcaacatttgcaaattatttttacaaataacaataattggatgtaacaaaaagcagagtattttgagacgtatattaatgcaaaatattgttaatgtatcagtggattgttcctccaaagtaccagtgccttaacacaacatatctaaaagaacatctctgggaacagtagtacttaatggcaacttgagaattggtttgtgggcacacagccttgtgaagttttgaatactaaatcccttttttaaaaaagtgcttattatcaggctatcaatcaaaagatttgagtctttcagtaaagaaaatttgcttaattttatctagtgcatgataaactttactaaggaagtctcattcagaatatctaatattttggatgtgagcccacactggaaatgccataaccaaaaaagagtgaccctaaagatagaatattcagatctaatggcagatgcttagctatgctgggaaaggaagtgaattgtatattgctctgctgctcacatattcctctgcaataaattgctggcccagtttagtttttatatactcactactatactaatgaggatggctcaattttttatttgaacgtactataatgaatttaaactttcattggtatttatgttttaacaggttttcactatttcaaatatacttcaataaatatccttgtctgtgatcattggtttatgtgaattggaatttcagtagctgtatatacatggaagtacaattgctcatacatcatacactctttcagttatgttagataatactaaatcaaccatgggttctgtataccctactagatatttccaaattgttctcttagactcctgagaactggtaaattgagtgctatagcttcagtttaggtatgtttttgtatgtattcctaaattttgacttaagccatttttcaaatgtatttcttggcctatcatcattcctttactttgactttcatattcttggctttctccattatttttgtcttgtttttttcttccctctaattgacttgaatgtcattctggatactttgctatgttgatgcagtattttccaccacatgcatatagtctgaccatgcattctatctttatgagacattttaagatttataggttatcagttatgtaatctttgcagattacacaaataaaattttattttccagtatttatatttatttttcttattgcaatagctagaatcttcagaacacagttgaatattatggtagtaggtatcttttgtttccaaatttaatggaatatttcccaacatttttttctttggtcctatgtttcctcaagaacctacatttaatcatttactataatattcactcttcatttggggataaattctctgctgactttaaatttccttcaatatatgtaggggtagagggaggatgcctacttttgtagtgattgttaatttaaaaactgctgaattttttccaaggccattttgttatctattttaattttatgtttttctccttaaatttattgatgtattgatttgtacttatgactttattaaattttaaacatttcttgtaatatgctacaatttttgtcatactgctagagtccatttggtgatattttaattagaactttttcatctatagtcaaggcagtattatagtttctttttattttattgataagattttagagttgtaatgatctgttctttaacacctagaaacaatttgtccttaaagtatttacatttttgtatcttgatattacattttatgatttgctaaattcacttagctttagcagggttttttgttttttttttttgagacggagtcttggtctgtcgcccaggctggagtgcagtggcgcaatctcggctcactgcaagctccgcctcccgggttcacgccattctcctgcctcagcctcccgagtagctgggactacaggcacgtgccaccacgcctggctaattttttgtatttttagtggagacggggtttcactgtgttagccaggatgatctcgatctcctgacctcgtgacccacccgcctcagcctcccaaagtgctgagattacaggcgtgagccaccgcgcctggcctagcagggtttattttttataaattacttagaattttctataaacgcaatcaggacatctgtcaagacagttccttttaatttatatttcctttatttgccatactgcacaggctagggcattctgtagagtgttgaatggaaatgttcaaagcaaggctgggcgcagtggctcacgcctgttatcccaacactttgggagtctgaggcagttggatcacctgaggtcaggagttcgagacaaacctggccaacatggcgaaaccccatctctactaaaaatacaaaaattagctgggtgtggtggtgcacctgtgatcccagctactcgggaggctgaggcaggagaatcacttgaaccctggaggtggaggttacagtgagccaagatcgtgccactgcactccagcctgggcaacagagcaagacgctgtcttaaaaaaaaaaattatcagagcagacatccttaccttgagtctgactttagtgaaaaagcagtcaataatttatcataaagttctatgttagctgtttattttccctagatattctttttggttttttgacaaatcttggggcaatttgccattgaagtcatctgagtcaacctttctttgcggaaaggatttttagtggtagtttcaaggacaatataccaaaaatattgaatttttctatcatagcaaacaattgaaaatgaaatcaaaaaaattttcattgataaagaacataaaatacttaggaatatatttaacaaaacacatgcaagactactacctaaaaattacacaattttgttgagagaagctagggaaggccttaataaattgaaacatcttccataattacagatgagaagacccaatgtttagaagtcatttctcaaattgatctagggattcagtggaatccagtcagaatttgttctggagcacagcagtgaagtgaggattggagggagctggtgtagctgcactttgaggtaggttcattagctgttgcaaaaggctggtgatagtcactgttggaagatgatagaggaggagagagaagggactcagtaagcatggcagcacctcatcttgtgcatctttcttgataaggaaagggaggtccctggctgttgtcatgaaaatgtcagctgcttgctctgtggagaggaaaggaagaatacgggcaaccactgtcttccctttttggatacacatgatctgtacaaagcggtcatcactaggcctctcttgtccaggctgtttccctcttaagttgtcatacatgctacaaattccgtactttcgctcatccattagagcaggtcgctgtcttagacttaggagataatgtctttcatagtcctccacatcaaggagtaaactgtaggttttcttaattatgacgggtttttctcctcttgtctcgaatttgtttttcttttatctcatcatcctcactccaagatgtcacaacagcatcaatcatttttcagggattattcacactagaaacagtaagctttcccaaagagcccacaaattgtactggcttataggtgcgctccagtttggccacttgaggggtaataagcttgttatgctcctttttagggccatcacctcgtatttcttcagcagctgatggtttctccagtttttcaaagtaattctggtaataaaaatcatccaggtggggaccattgctttgcagttgcatcatctgaattttagaggcccaatccttttcccacagcaacatgagattggcatatggatcctttcggagatgatcttgatgactgctccagtgacttcctctatctcctgcaccactgagattctgatgctgatttctattctgttgctgtctctgatgcaagagtcaatggtgctgtggatggaggggagttgcgtccagtctaaacactgggacttgagatcttaagttttgcaagtgaggtcctgggccaggagggcgctgctgtggaggtggtgtagcggagggtggagcactaaagaaggcatggaagcctggtgctgggggaagcatctgcccaacttgcccttgtagcaacttgggattcatagcagcatgcagactaccaacaaatccagggacccatgcaaactggctgggagacatctgtccaggctgtagctgtgctcctccaagaagctgtgctctctgaaaggggctgagaacaggaggaacactaggaggaaaagggtgacccaggagggaagagttcaggacactgtagagctgatttggaggcatcctctcatcatagggaccaggataacacggtggcattgggggccgaacatggacaggctttgaacgcagaatcttccaaattggctttcgttttcagttgctggtttcaggcggaggaaagtctatggaataggactgcacaggctctgttgggtaaagctgggtacggccatctgcttaggtggggtgcctatggggacagctctaacaggaggactgccaatgacaggtgaagttgaccaccttggtaatgcatgttcagaaaggtcccaatcattttctggaccctggggggcctctgaggcaaggcatattctaatacagacactgtagacatttcctaagtgagcagtggtcctcagatttgcctcataactttggatccatcccagatactggaattcagatttcctggttggggttataaaactggcctggtctgcactgccctcatgatagctggatcttctagttcattttcaatcaccatcttactgagcctttctgccagattttcctcatggtcacccaacaagtccatttcttccctttctccattgcctgtttgttcattaactgccactggtagcttttcttccaattcagccaggcactcatgtgcttcctgccaatcatcatcaactgcacctgacccaaaaatatcatcattgaattgatcaatctcttcatcttcttctctcagtccctgaaattcatcttcatcttcatccagaagacaatcctcccaagactcatagtggaacattcttggggaggtgggggggagtggggaggggagtgggggagggagggaagaagcactgactccctgggctcctccatgggcaggtcctccaccagcttgcgacccctggccacctatttctgtttctttttttgttcctatgaattctagttactatcatgtatcatttccttactccaatacaactctgctgtcatttacttcctttatgctgttattgtcaaatatattacatttccatgttataggcccaacaatataattatgtacatactgtattatacaactgccttttaaatttattaagagaagtaaaaagaaatgtgcatttgtgctgctttttgtaattttaattatattaattttgttctttttaaaaatgtggttttgaatttccatgtagatttacttgctttgtttgaataacctttacaatttcttatgtggtaggtctgggaagggctttatttcaccttcatttttgaaagacagtgtgttactgcttgacagagcttttgtcgtttgagtactttgaatatatcatcccactaccttcatcccctccattgctttggataagaagtcagctgtcaatcgattggtgttccattgtaagcgacacatcatttttctcttatatttttcaacattttctttcacttttagcatttctactatgataggtctgttcatggatatcttcgcattcattctgattacagtttgttgagatgcttgtgggtattgattaatgtttattcaacaaattgtggatgtattttgccattatttctttgaatatttttgtgctcatttctctttctcctttccttctggtattctcattacatgtatgttcatgcacttaaaagtgctctgttcatattttcttgttcttcaaggctctgttcatattttctttgttctattttctcattctatttcattttattttcttattcttttttctagtgggaagatggaattgaggttgcataatttccattgatctgtttgaaagttttctatttacttgctgatcaaatttgtttagcccttctaatgaattttttattttggttactgtagtcttcaactccagaacttacatttggttcattttgtcatttctccttattgattttctttatttgatgagacgttatctttatattttcctttactgctgtgaatatataatggctacatcgaagtttttgtctattaaatatgacatctgttccctgtcataggccaacctgttgccgtttttttttgttgttgttgttgttttgttttgtttttttttaagagtcttgctctgttgcccaggctggagtgtagtggtgtgatcttggctcactgcaacctctccctcctgaattcaagcgattctcgtgtcttagcctagttataggcatgtgctaccatgcctgcctaatttttgtatttttagtagagatgggatttcatcatgtagtccaggctggtctcaaaactcctgagctcaagtgatctgccaaccttggtctccaaaagtgctgggattacaggtgtgacccactgcacctggcctgcttgctgttctcctgtgtataggtccaactttcccatttgtttgcatgtcttaatttactttttattattttcctaataagtagacatattaggaaacatactgtagtgatttgcctgtcccctctccagagcttgttcttgttgttgtttgcttggctatgtattttgtgttttggctaagctattttagtaaaatcgatttccctttccccttgcagtgtgaagtattttgtgttgttcctcagccttaaacatatgcagttaccctgctgtgacaatggttttaaacaggagtctttttgactatctttccctatctctctgttaagataactgcccccttggtattatttccagcccactaagctccgctgccgtctatctggtcactccattgttttcaacatttccttggagcctaaattattaagcagtttaatataatttaagtcaggcagggctaatttttgaggccagtttttaaggtttcttttgacctttggagggctccttagctgtctcttcccatggaattatctgattaactacctggcctatggtttatgttgttgtgtttactttaggggagctatttgtttgacactgtttcagataaagtccattcctttggagagagcttcagagctctattcttatggactgccactccctctggacaaaatctctgaaccaccattctgggtaatgggctgggttgtagccatcttgttttttatgttatgaaacctctgccttagaagcaagtggaggcaagggcaatctgggtgcaaatgagttcactctgcctgggtagagtttccaaactctgggtggggctgggggaagcaaaggagccccaaacctcctagttgcgttcaccaggaatttagccactttaaccaagagctggtggggataagaaaccctggaggcatgcccctcctgttgatatatgacaaaccttgattgacagctgcagccccatcatcttggcagcatccacccacagagaagcttctatcaaattgagctgtgaagagtaaaagggagttgtgtcttaaatgccacaaattctcttaccaagttcttggttcttaccaagttttagtagaatttcttgatatttcacttcctatatactgtttggacactttcagacctcaaatggcaaggtttttatacatttttttttgccagttttattagaaaatgagtttgcagagcccccccatctaccatccagaagtggaactacatatagtcatttaacaatagtttagcattttctgtcatctcattctggagaatcatagatgtggcagaaatacatattcttgaagaaaaaaaatgtctcccttatgggtactgtgatttcaatagggtgtgggataagtacatgacaacatgcatgggatagacactctgttctctacagatccgtgctttggaattacagaacataaaagatataatgatggttattactttttacatgtgacaatctagttgtagcgtttaagattaaatttggttgtgagtaaaatagtaaaactgccccaaattaaagtggataaaatataataaaagttaatttctctgtcatataatatggatgtaagcctgatactgtggccttgctctaaaccaatcatgaattttaccattctggcatcagaatggaatgagcactcagacttatacagaacttggaagaatagtaaataattctggttacccttcacccagatttctcaaatattaatatattaagctagtttgttttaagaggtttccagaattgccaaaatattcacttacatcctacttgccataagttatgtcacatgacaacaccttggagaaataactgcagtccttattctagatagtcacagccaactatcaataaaaattactggttctataatcatgaaagcagggtagaatggatatgcgggcctaataaataacagatcctgacccactgaggaatcctggagatggtttcattttgatcaattacaaatgaagacagtgaatccctgagaccacaacttgtgcagaagactcattgaaatggaatggtattctggaaattaagacacacaggtccgttatccctcataccccaagctggatgatcacaataccctgtaaaaggatgacagaaatcttgtgtctactttttcttcttttctggggagtctatgaacattcaagataacatccatgactgaatattctaaaacaagtttctttacaacgctgctcagaaacaccatgacaaatttaaatcagagcaatatctccaaaaatgggaggcagattaatgtatcatttcagccaggccttaaaaggagataaacttctcagctatcaccatacataaaacataattcaataaaataccaaatgcaaacaagagcagatcatagaaatgtaagttgagaaaattcagagggaacttctgaccttaggatgacattttcaactctgaaactattaaaagaattctaacaaaagcagcatctttttttccatacctgtaactgccatgtgcactcacagcagccagattttttggtctctaattcttttttcctctaaaaggaaccaggactccctaagataagagggtattaaatcatgagttgattccatgactcaggacaagaggcatgggggacatgaaccaacaaacagggtcagtcttaaacatcctcttacggcctgaaaacaatattcctttaaaacatcaaaagaaaaaaataagtagtaaaaaaaaaatgtaaatggattcctactggccacattatgtcaatttgagcataaataataataattactacaggtgcttctcaacttacggggagttatgtccaaataaacccatcataaattgaaaacatcatacaccatatgtgcatttatggtctacaatattttcaatttaacaatgggtttatctagatatagccccattttaagtcaaggagcatactctgactgagtatgtcttagttttgtgttgctataaaggaatgtctgaggttgggttattaataaagaaagaggtttatttggctcagtgttctgtaggatttacaagaatcatggtgcaacatctgcttctggtaagggcctcaggctgcttccactcatggcagatgaaagggggcagtgtatgcagacatcacatggcaagagaggaagcaagagggtgaggaaggaggtgccaggctcttttgtacaaccagctctcataggaactaacagagtgataattcaccccccaatccagagaggacattaatttattcatgagggatcttctcccatgacccacacacctcccattaggccccacctccaacattgggatcaaacttcaatatgagatttggaggggataaatatccaaactatagcagcatatcacttttgtactattataaagctgaaaattataagtcaaaccattttaagttggggattacaggcgtgagccaccgtgcctggccgtgatttttaaatttgtacatacttggtttgtaactttaacaaatatattaaagtgttttattatgtttgcaaagggactctgacttccaacatagtactgccatgattgcatgatgatagagtttcaccgaaaggctgccagggatctttctgacaactcttaatgatactaccgggatgtgcaatgacccagaaaggagttgtgctaggttaatacccagggactctgctgatttcaaagaagaaagttcaagagaatggatagaaaaaagatgaaactggaaataaaaaataggaacataagatttgaaagccaagttttatataatcttgttttataagttgtataacatcattgcaatatcaatacctgaaaaatacttggaaaattataactttacttatgattatagatgcaattaaatggtaaaagatagaattaagtagtctattgaaagaataatcatctgaccagggtatattcataaaaagaagaaagctatcaatataaattatcactttatagatttttcaacacaatggaataaaatcacaaaggattattcttaatcttaaaaaaaatttaatctaattcatgatgccacatcggtatcatgttttgttttggggtttttttgagatgaagtctcactttgtcgcccaggctggagtgcagtggcacgatcttggctcactgccacctccaccttccaatttcgagtgattctcctgcctcagcctcccaagtagctgggattacaggaatgcaccaccatgtccagctaatttttttatttttaggagagatggagttttgccatgttggccaagttggtctcaaactcctgacctcaggtgatctgcccaccttggcctcccaaagtgctgggattacaggcatgaggccactgctcccggcttaatggtatcatgttttacagcttgatttaaagggttaatattttttcaaatttttatcaacagctcatgtaccagccatggtataggtgctggtgataaatgctgaacaaaaaagaggttccggacaatcttggctccctatacaatccaaagggtgccagttttgtactgagtacagtgtcagccatatcacacaagttgaattatgttgacgctttaatggcattcatttctcaatagtctatttcaattttcattttgtattcaatccagggcttaagtacacgtgactataacttttcagagatgacaacgtctctccatagattacttacccactacaaactaaatctttacaatggacttacggcggttaccagcttacccaaatgatcatccttagtttcactaatgcaaggacctgtacttaaatgttttctgacagtacaatatgacatagaaataacctacaaagtattcttccccaaaacgtttaatctagacctaagaaagcctctggacttactttcccttgtaaagaaaatacaaccaagaacaaggctaaatgacactataaagaaagaaatctaaacacatagccaacaacatttctgggctactcaaaattcaatgtcatttttttaaaatgagaaatgttctagaccagtggctctctaactctggttggtatcacagacacaaaacctggagaaataataaaaaacagaggcccaggcttataaactagggctacacttctgtaggtttactaagttccacaggggattctgatacccaccataatttgagagcatactttcatggggtttccatgctacaatacactaaagagagataaccaaatgcaatgcagaatctgcaatggactctccttagaaaatgaatagctgtaggccaggcatgctggctcatgcctgtaatcccagcactttgggaggccaaggcgggtggatcacgaggtcaggagatcgagaccatcctggctaacagagtgaaaccctgtctctactaaaaatacaaaaaattagctgggcatggtggcgggtgcctctagtcccagctactcaggaggctgaggcgggagaatggcgtgaacccaggaggcagagcttgcagtgagcccagatcgcaccactgcactccagtctgggcgacagagcgagactccatctcaaaaaaaaaaaaaaaaaaagagaaaatgaatagctgtaaaagatggtttgcaggccaaggaagaaatctgaagatggaatgatattacagaattatgaatattttccttaagggtaattatggtactatggttatatgatattgtctttatgtttgggtaacacacatgctgatgtaacaaggagtaaagtgtcatgatatctaaaacttattctcaatggtctaaaacttattctcaatggtacaacaaatatacaaaaaataaatgtggcaaattgttaacaattttgaatctaggtgggggggatatgtgtatatattttactattctttcaaaacccacaacaattatcaactaggttcaccatcttttatgggcaggatttgtggtatccccaaacaattacactagtaacaattacactagtaatcaaaaaacactggtcacagatcaccataacagatttaacaatgaaaaagtttgaaatattatgaaaactagcaaagtgtgacacaaagacatgaaatgtgcatatgctgtttggaaaatggtgctgatagacttattcactgcaaggttgctgcaaaccttcagtgtgtataaaatgcagtaactgcaatgcacaattaagcaaggtacgcctgtatccagtaaaatatttcacgggcagtaaactgtgaacatggcagctactctacattcctcacatcagtaactttctcaccaaaattatcttctctgaactctaaggcatttagtgtggctataaaatatcccacattctttacactcaaaggagttctcagcagtatgaatactctgatgttgagcaaatcccaggccacgatgaaagttcttcacacattcttttatgttcacaggatttctcatcaatatgaattctctggtgttgagtaaatttttcatacacagtgaaggcttgtctacactccttatattcataaaacttctaactataatgaattttctgatgttgcgtaagcagatcattcacagtaagggtttgctcacattctttacattcatagggtttcatgccagtatgaattctgtgatgtgcagaaaggactgaactaagtctaaaggtcttcccacatcctttacattcacagggttgctcaccagtatgaattttaacatgttgaacaaggctcgagctacaagtaaaggtctttccacattctttacattcatacggttcataccagtatgaattctttgatgtgcagtaaagactaagctaaatccaaaagttttccacattctttacactcacagggtttctcagcagtacggattctcagatgtacagtaagatcataattactgctaaaggccttttcacattccttacattcatagggtttctcatcagtatgaattttaacatgtttaacaggtttgaactatgactaaaggctttcccacattcttcacattgatatggtttctcaccagtatgaattctctgatgtactctaaggtttctaccactggtaaagcatttcccacatccttgacattcataagggttctcacgaatatgaaatctataatgtccatgaaattggtaatgatattgaaaggccttcccacattccttacattcaaaggttttcacccaagtatgaattttctgatgttcagtaagttgctactgatgtctgaaggctgtcccacatttcttacattcaaagggtttctcacctgtacaagtttttgatgcagagaaagttgtaggtgaagtctaaaagccttcccacactccttacattcatagggtttctcaccagtatgaatactctgaggttgaacaaggtttgagccacgattaaaggccttcccacactccttacatttaaatggcttctcaccagtatgaatgatctgatgttgagcaagctgtgtcagaagaccaaaggcctttccgcattctttacattcaaagggtttctcaccagtatgaattcggtaatgttcagtaagctggtaatgatatctaaaggtcttcctacactccttacatacaaagggtttcgcactggaatgagttttctgatgctgaataaggtttgaaacacgactaaagcctttcccacactccttacattcatatggttttacaccagcatgaatactctgatgttgaacaaggtttgagacacgattaaaggacttcccacattctttacatttaaatggcttctcacctgtgtgaatgttcttatggtgattaagctgggtgtgaagactgaaggccttgccacattccttacattcaaagggcttctcaccagtatgaaatttctgatgtcgaataaggtgcatatgaagtcgaaaggctttcccacattccttacattcaaagggtttctttccggtatgaatacttcgatgttgattaagatttgaaccacgacgaaagaatttcccacattccttacattcaaagggtttctcacctgtatgagttttctcatgttgagaaagttgtaggtgaagtctaaaagccttcccacactccttacattcatagggcttctcaccagtgtgaatactctgatgttgaacaaggttcgagccacgattgaaggccttcccacagtctttacattcaaatggtttctcaccagtatgaatgttcttatgtcgagcaagctgtgtcagaagactaaaggcctttccacattctttacattcaaagggtttcccaccagtatgaatttggcaatgttgaataagttggtaatgatatcgaaaggccatctcacattccctacatacaaagggtttctcattggaatgaattttttgatgctgaataagatttgcaccacgattaaagcctttcccacactccttacattcatatggttttacatcagcatgaatactctggtgttgaataaggtttgaactacgattaaaggacttcccacattctttacattcaaatggtttttcacctgtgtgaatattcttatggcgattaagctgattgaggagactaaaggccttcccgcattccctgcattcaaagggcttctcacccatatgaatcttctgatgtcgaacaagctttgtcagaagagtaaaggcctttctgcattctttacattcaaagggtttctcgccagtatgaattcggcaatgttcaatgagttggtaatgatatcgaaaggccatctcacattccctacatacaaagggtttctcattggaatgaattttttgatgctgaataagatttgaaccacgattaaaggctttcccacactccttacattgatatggttttacaccagcatgaatactttgatgctgagtaaggtttgagctacgattaaaagacttcccacattccttacattcaaacagtttcttaactgtgtgaatgttcttatggcgattaagctgggtgggaagattaaaggcttttccacattccttacattcaaaagttttctcaccagtatgaaatttctgatgtcgagtaagttgtatgtgaagttgaaaggctttcccacattctttgcatttatagggtttctctccagtatgaatactctgatgctgaataagatttgaaccacaactaaagtatttcccacattccttacattcatatggtttatgtgtattatgaataggagaagcatgagtataagcaggcatttcttcatagctgatgatcttctggttgatatatccttcttgatgtccctgtcgtccctcaaatctacttctatattctgagtcatttctaaaataaaaggcctcgaggccaagtgttttacttatttgctttataacatgtttgggtaaatttatttcaaaaatatcattttctggagatattttctcaggtccatattttgactccaaatctgaaagaaatgaagaaggcaaacctattttattttcctataacatacatgcatacaaaatccattaaacaaatggcctaagtataaaatataatactttcagggaagggatctgaaaaaggaaaagggtgccaataatgaatttatgtaagatggtggtgtgcataagggaacaggttaactttgtcaaatttaggtgtgaatcaaaaccatttggtaagattaaatatattgatattcaagcaactcagatgtacagaatcagaatttttagtgaagaaagctttttttttttttttaagacgaagtttcactcttgtcgcccaggctgcagtgcaatggcacaatctcagctcactgcaccctctacctcctgggttcaagtgattctctggcctcagcctcagcctccagagtagctgggattacaaacatctgccaccgtgcctggctaattttggtatttttagtagagacgaggtttcacaatgttggccaggctggtctggaatgcctaacatcaggtgatccacccaccctggcctcccaaagtgctgggattacaggtgtgagccattgtgcctggcctctattttttttttttttttttaagagacagggtctctctctgttgcataggctatagtgcaatggcatgatcacagctcactgcagcctcaaactcccaggctcaagcaatcctcctgcctaagcctcccaagtggctacagctacaggcacatgccactaagtctggacaatttctttttctttagtcttcctgcagtccaaagtctggctaatttttactttatttttatttttactttgtagagatggtgtcccaccatgttacccaagctggtcttgaactcctggcatcaagcaatcctcctgccttgatctcccaacatgctgtgatcaccagtgggagccatcacacccagccaaagctgtatttttaatatctctaccagatgattctgattcagatcaaagtttacagatcatacttaaaactggttttgaatggtttatctttagtcttagcacaaaatccaaaaaccttaacacagagaacaaaacttcctatcagggcactgtcctcctttgtggctgatctctaaccactccctccttttagcaaccagaacatgatataacctttctcttatcttcttgcttgcttagactgcttcatcttccaagaatcgtctggctttgctctttgtaacaaacatccaactcctcttttttttttttctgtttatatatatatatttttttaattttattattattatactttaaattttagggtacatgtgcacaatgtgcaggtttgttacatatgtatacatgtgccatgttggtgtgctgcacccattaactcgtcatttagcattaggtatatctcctaatgctatccctccccacctcctcccaccccacaacattccccggagtgtgatgttccccttcctgtgtccatatgttctcattgttcaattcccacctatgagtcagaacatgtggtgtttggttttttgtccttgtgatagtttgctgagaatgatggtttccagtttcatccatgtccctacaaaggacatgaactcatcattttttatggctgcatagtattccatggtgtatatgtgccacattttcttaatccagtctatcattgttggacatttgggttggttccaagactttgctattgtgaatagtgccgcaataaacatacgtgtgcatgtgtctttatagcagcatgatttataatcctttaggtatatacacagtaatgggatggctgggtcaaatggtatttctagttctagatccctgaggaatcgccacactgccttccacaatggttgaactagtttacagtcccaccaacagtgtaaaagtgttcctatttctccacatcctctccagcacctgttgtttcctgactttttaatgatcgccattctaactggtgtgagatggtatctcattgtggttttgatttgcatttctctgatggccagtgatgatgagcattttttcatgtgttttttggctgcataaatgtcttcttttgagaagcgtctgttcacatccttcgcccactttttgatggggttgtttttttcttgtaaatttgtttgagttcattgtagattctggatattagccctttgtcagatgagtaggttgtgaaaattttctcccattttgtaggttgcctgttcactctgatggtagtttcttttgctgtgcagaagctctttagtttaattagatcccatttgtcaattttggcttttgttgccattgcttttggtgttttagacataaagtccttgcccatgcctatgtcctgaatggtattgcccaggttttcttctagggtttttatggttttaggtctaacatgtaagtctttaatccatcttgaattaatttttgtataaggtgtaaggaagggatccagtttcagctttctacatatggctagccagttttcccagcaccatttattaaatagggaatcctttccccattgcttgtttttgtcaggtttgtcaaagatcagatagttgtagataggcagcattatttctgagggctctgctctgttccattgatctatatctctgttttggtaacagtaccatgctgttttggttactgtagccttgtagtatagtttgaagtcaggtagtgtgatgcctccggctttgttcttttggcttaggattgacttggtgatgcgggctcttttttggttccatatgaactttaaagtagttttttccaattctgtgaagaaagtcattggtagcttgatggggatggcattgaatctataaattaccttgggcagtatggccattttcatgatattgattcttcctacccatgagcatggaatgttcttccatttgtttgtatcctcttttatttccttgagcagtggtttgtagttctccttgaagaggtccttcacatcccttgtaagttggattcccaggtattttattctctgaagcaattgtgaatgggagttcactcataatttggctctctgttggtctgttattggtgtataagaatgcttgtgatttttgtacattgattttgtatcctgaaactttgctgaagttgcttatcagcttaaggagattttgggctgagacaatggggttttctagatatacaatcatgtcatctgcaaacagggacaatttgacttcctcttttcctaattgaataccctttatttccttctcctgcctaattgccctggccagaacttccaacactatgttgaacaggagtggtgagagagggcatccctgtcttgtgccagttttcaaagggaatgcttccagtttttgcccattcagtatgatattggctgtgggtttgtcatagatagctcttattattttgagatacatcccatcaatacctcatttattgagagtttttagcatgaattttgttgaattttgtcaaaggccttttctgcatctattgagataatcatgtggtttttgtctttggttctgtttatatgctggattacatttattgatttgcatatgttgaaccagccttgcatcccagggatgaagcccacttgatcatggtggaaaagctttttgatgtgctgctggattcggtttgccagtattttattgaggatttttgcatcaatgttcatgaaggatattcgtctaaaattctcttttttcgttgtgtctctgcccagctttggtatcaggatgatgctggcctcaaaaaatgagttagggaggattccctctttttctattgattggaatagtttcagaaggaatggtaccagctcctccttttacctctggtagaattcggctgtgaatccatctggtcctggatcttttttggttggtaagctattgattattgccacaatttcagagcctgttattggtctattcagagattcaacttcttcctggtttagtcttgggagggtgtatgtgtcgaggaatttatccatttcttctagattttctagtttatttgtgtagaggtgtttgtagtattctctgatggtagtttgtatttctgtgggattggtggtgatatcccctttatcattttttattgcatctatttgattcttctctcttttcttctttattagtcttgctaatggtctttcaattttgttgatcttttcaaaagaccagctcctggattcattaattttttgaagggttttttgtgtctctatttccttcagttctgctctgattttagttatttcttgccttctgctagcttttgaatgtgcttgctcttgcttttctagttaattgtgatgttagggtgtcaattttggatctttcctgctttctcttgtgagcatttagtaccataaatttccctctacatactgctttgaatgtgtcccagagattctggtatgttgtgtctttgttcttgttggtttcaaagaacatctttatttctgccttcatttcgttatgtacccagtagtcactcaggagcaggttgttcagtttccatgtagttgagtggttttgagtgagtttcttaatcctgagttctggtttgattgccctgtggtctgagagacagtttgttataatttctgttcttttacatttgctgaggagtgctttacttccaactatgtggtcaattttggaataggtgtggtgtggtgctgaaaagaatgtatattctgttgatttggggtggagagttctgtagatatctattaggtctgcttggtgcagagctgagttcaatttctgggtatccttgttaactttctgtctcgttgatctgtctgatgttgacagtggggtgttaaagtctcccattattattgtgtggcagtctaagtctctttgtaggtcactcaggacttgctttatgaatctgggtgctcctgtattgggtgcatatatatttaggatagttagcgcttcttgttgaattgatccctttaccattatgtaatggccttctttgtctcttttgatctttgttggtttaaagtctgttttatcagagactaggattgcaacccctgcctttttttgttttccattttcttggtagatcttcctccatccctttattttgagcctatgtgtgtctctgcatgtgaggtgggtttcctgaatacagcacactgatgggtcttgactctttatccaatttgccagtctgtgtcttttaattggagaatttagcccatttacatttaaagttaatattgttatgtgtgaatttggtcctgtaattatgatgttagctggttattttgctcattacttgatgcagtttcttcctagccttgatggtctttacattttggcatgtttttgcagtggctggcaccggttgttcctttccatgtttagtgcttccttcaggagctcttttagggcaggcctggtggtgacaaaatccctcaacatttgcttgtctataaaggattttatttctccttcacttatgaaacttagtttggctggaatgaaattctgggttgaaaattctttcaagaatgttgaatattggcccccactctcttctggcttgtagagtttctgccaagagatccgctgttagtttgatgggcttccctttgtgggtaacccgaccttactctctggctgcccttaacgttttttccttcatttcaactttggtgaatctgacaattatgtgtcttggagttgctcttctcgaggagtatctttgtggcattctctgtatttcctgaatctgaatgttggcctgccttgctggattggggaagttctcctggataatatcctgcagagtgttttccaacttggttccattctctccgtcactttcaggtacaccaatgagacgtagatttggtcttttcacatagtcccatatttcttggaggctttgttcatttctttttattcttttttctctaaacttctcttctcacttcatttcattcattttgtcttccatcactgataccctttcttccagttgatcgcatcagctcctgaggcttctgcattcttcatgtagttctcgagccttggctttcagctccatcagctcctttaaggacttctctgcattggttattctagttatccattcgtctaattttttttcatagtttttaacttttttgccattggtttgaatttcctcctgtagctcggagtagtttgattgtctgaagacttcttctctcaacttgtcaaagtcattctctgtccagctttgttccattgctggtgaggagctgcattcctttggaggaggagaggcactctgctttttagagtttccagtttttctgctctgttttttccccatctttgtggttttatctacttttggtctttgatgatggtgacgtacagatgggtttttggtgtggatgtcctttctgtttgttagttttccttctaacagacaggaccctcagctgcaggtctgttggagtttgctagaggtccactccagaccctgtttgcctgggtatcagcagcagtggctgcagaacagtggtggctgtagaacagtggatattggtgacccgcaaatgctgctgcctgatcgttcctctggaagttttgtctcagaggagtacccggccgtgtgaggtgtcagtctgcccctactgggggttgcctcccagttaggctgctcgggggtcagggaaacacttgaggaggcagtctgcctgttctcagatctccagctgcgtgctgggagaaccactcctctcttcaaagctgtcagacagggacatttaagtctgcagaggttactgctgtctttttgccctgcccccagaggtggagcctacagaggcaggcagtcctccttgagctgtggtgggctccacccagtttgagctccccggctgctttgtttacctaatcctgggcaatggcaggcgcccctcctccagccttgctgccaccttgcagtttgatctcaagacagttgtgctagcaatcagtgagactctgtgggcataggaccctccgagccatgtgcgggatataatctcctggtgtgccgttttttaagcccattggaaaagcacaatattagagtgggagtgacccgattttccaggtgccatctgtcacccctttctttgactaggaaagggaactccctgaccccttgcacttcccgagtgaggcaatgcctcgccctgctttggcttgcacacagtgcgctgcacccactgtcctgcatgcactgtctggcactccctagtgagatgaacccggtacctcagatggaaatgcagaaatcacccatcttctgcatcgctcatgctgggagctgtacaccggagctgttcctattcggccatcttggttccacccctctaactcatcttttaagccttaggataaatgttttcctcagaacatctgaatgaatgaataaagccaccgtaacatatgggacatcataaaacaacaaaatatttgaatttttgaggtcctagagacaaagagaaaacataaaggatagaaaatctatttaatgaaataatagcaggaaactttccaactctagtaagagatgcagacatcttgatacaggaagctcagagatacccaaatagatacaatacaaaaaggtcttctccatggcatattatggtcaaaatataaaagtcaaagacaaaagagaatactaaaaacagcaagagaaaagcatctagtcacttacaaggaaactctcatcagcctaacagcagatttctcaacagagagaaatgagagagaatgtgattatacattcagtgttgaaagaaaaaaatcaccagtcaaggacactatcctcagcaaagtattctacaaaaatgaaaaagaaatagtctttcccagacagcaaaaggtgacagaattcatcaccactggaccaaccctacaagatatgttcaagagtcctacacctagaagtgaaaggacaatatctaccattgtgaaaacacacaaaagtataaaacctactgacacagcaaacatacaaataaggacaaaggactcaaatgttacccctaaagaaaacaaccaaaccacaatgataaaaaataaaagagaaaggaacaaaggataaacaaaacaactagaaatcaattaataaaatgataagaatcagccctcacatatcagtaatcacactgaacgtcaatggattaaacttcatttaaaagatacagacgggctgaatggatgaaaaaacatgatccaactataagctgcctacaagaaactcttctcactggtaaagacacatatggattgaaagtaaaagaacaggaaaagatattccatacaaatggaaaccaaaagtgagtagaaatagctacgtttatatcagaaaaaaacagattttaagtaaaaaacagcaaaaagagacaaagaaggtcatcatataatgataaagggatcaattcagcaagagaatataacaattctaaacatataacaccaacaccagaacacccagatatataaggcaaatattattagagcaaaagggagagagatactacagtataataatcactggggacgtcactgtgccactctcagaattagatcatctagagagaaaattaacaaagaaacattgggtttaaacatacctgagaggatgagggaaaaagggaactcttatatactgttggtgggatataaattagtacaatcactatggaaaacagcatgcagatttctcaaaaacctgaaaatagaactaccatatgatccaacaatcccactactgggtattaatccaaaggaagataaaatcagtatatcaaaatgatacctgcacttgtatgattactgtagcattattcaaaataccaaaggtatggaatcaacctaagtgtcccccaacagacaaacagataaagaaaatgtgatatatacacatggaatactattcaggcatttaaaaaatgaaatcatgtcatttgcagcaacatggagggaatcggaggtcagaaagacaaatatcagactgggcgcagtggctcacacctgtaatcccagcactttgggaagccgaggtgggtgaatcacctgaggtcaggaatttgagaccagcctggccaatgtggtgaaaccctgtctctattaaaaatacaaaaattagccaggcgtggtggcaggcacctgtaatcccagttactctagaggctgaggcaggagaattgcttgaacccaggaggtggaggttgcagtgggccaagatcgcaccactgcactccagcctgggcgacaagaatgagactccaactcaaaaaaaagaaagacaaatatcatatgttctcattcatatctggaggctaaaaaaagatctcacagaggtaaagaatagaatgatagaaaccagaggctgggaagggtgtgtgggtgaggggtgggggatgaagaggagttggttaatgttacaaacatacagttaaatatgaggaatgacttctaatgttcataagcagagtagagtgactctaattaacaacaatgtattgtatatttcaaaatagctagaagacttgaaatgttcctatcagaaagaaatgataaaccctcctctggtggatctgatggatacctcaaataccctgacacttgttcattacaccttctatgcatggaacaaaacataacatgtatcccataaatatgtacaaatattgggtatcaattaaaaatgaataaataactcttgaagaacttcccacattcctcacaacgacagtcaaaaccctgtatgatacgactccgacgtaactctcagacctttcttcccgctgttccattacttactccacctttgtgtttcctgctcagtctgactagagtacttgaacacttacttcacatctctatgcaagcaagcccacttccagacaggtaccctaagcacccaagtgctgccattctcaccccatcactcctatttccttgtctctatagcatgattatttggtattccttatctattcatttgcttacttgtttgaggcatgtctcaccaactgctggtaaagtccatgacagcagtgactttctcagtcttgttcattacctgtacattacagtattgaccagagccaagcatatgccttctaggaatgcgcactctatacatatttactgaacatgaatacatttcttagtgaaaacacatgtagaaatctaaatgcaaaagcagagttggaaagtagctggatccaaaatacgtgttaaaagtttacactgggggccagaagcattggctcatgcctgtaatttcagctacttaggaggttgaggcaggaagactacttgaggccaagagttcaagatcagctggggcaacatagcaagatgctgcctcttaaaaaataattttaaaaactgtttaaagtttacactgggaaagaaagaggaagctcacttcattaaaagaggaagaaaataacagaaattaggtgattagtaaatgatgaagttccttggggacagctcctacagtgatcttatttccttcccaggtcttgggcatttttgtccagtgggggaccttgggttattgaagaaagttttccaaaccacatctcaggggtgtgactcctctctgagcacatgggctgtccgggacaatgatggcttccccctgcctgctttactctcacttacctggataccatctgcttgtttctttacttacaacaatccagggctctttctcttgctctagtaatgtaatcacatctggcttagaaatggaacttcctgcttaaaagaaataacacatgtagaatttttttaatataaaaattttttttaaaccctgagacctagttaaacttataataaattacaagccaaaacaatattgagaagagactccagataagagaggattgagtaagggatcaactatgtttaaaaaaaaaaaaagcactttcatttaaactcataatagaaacttatccctcaagaggaggtataatttagtggttaacagcaggaaacttcaagccagattacctggttgaaatcctgtctctgccacccactagtactttgacattaagtaagtcacttgaactctctgtccttcagttttcccaactctaaaacagaaatataataatgcctgttttataggattgatactaatattaaataaggtaatatatgtaaaatacttctaactctcactcatacgtagtagcacaaagttaaaaattattatgtttattgtcattatttattttgcatccttagacatttacagctcattttaagaattttcacccaacagaaaagcatacacttcatggcctgaaactttcaactacaaaacaagtaacggaaggtctgtcgaaggaaatggaatatactgacttagtgctaaataagttctgtcaacccaatcagtatatgtaaatcattgaggctctgttttgttttgtttttttgagacagtgtcttgctctgttgcccaggctgaagtacagtggcatgaccacggctctctgcagccttgacctcccaggttcaagcaatcatagaggctcttttaatagaaaaactcaacacactcttctccttacaggtgggccagaaaaacaaaaacaaacaaagaaaatctacagtaattctgagatcaaacataatatgaaacctggttcttgaacaatatcattcaacgaatatacaagatttcaaattcagccccatggtcatgaagagagagaggggattacagagatgaccagcataatggaggaggccctggtgcagtaggcaagatgcagaggctccaaggaggtgcctgttttcaacccaacaaatctcaatccattccttcgggaataagaagaaggaatccaactacctcttaaaagacagccctgaaactcatgatgaagaaagctgatattccagagaacagatacaaaaataactgggaccaatgaccttacccagtgatatcaggtggctgtagttctccaacatcacatccctgtacaaggtcctctgatcaggctgcaggcactcccactcctcctgagagaagtcaatggccacatccctgaatgtcactgatccctgaaaccacaaacacatggattatggtgaaattgaagaaagttgtttcaagacgaaaggagaggaagtgaaggattaaactgcaataaaggagcaatatggaaaatcgcagagtgcctacacattcttcaagaatcctgctgctggcctggtgtggtggctcatgcctgttataccagcactttgggagaccaaggtggaaggactgcttgagcccaggagttggcaaacagcctgggcaacataacgagatgcactccctggaaaaaaaaaaaaaagaaagaaagaaagaactgtcgtggtggcatgtgcctatagtcccagctacttgggaagctgaggtgggagtattgcttgagcctgggagttcaatgctgcagcgaagtgtgatggcactactgcactccagcctgggctacagagtgagaccctatctcaaaaaaaaaaaaaaaaaaaaaaaaaaggtggcagcatacaattgaggaatgccgttaatcctcaagcttactgtggtatcagatgatagcaaaagtattttttcttgtcatgacaaatgatttttataagctgcgtaaaattcaaaataactgacatattagatttagtcatatttttctatttatacatttaagatggtcagagtctctaaggttttcccaaattcagagaatctgtaatcacctaccactcatgccctgaataatctctgttactgcccactgtcctcactgatcactttcctaaaagcctcataaagcagaacaccttgtcacgcttgcagactgaggccactcactatggaattctacctcagctacctagaaagctccagtctgtggaggagtttcaaggtgttcccgagtgtggtcaaatgcgacaatcatctgtaacttatcaaacccacaagaccatgtttccctgtggggaccaactcctccactgttccaacattctttctgaccaaggactgagttaagcacagactgaataacctgctcaaagaaaacatcaaagccagtgggaaaacagaggtacgaataggaagagcactgacttttattttttggtcaccaaacttcactgtaatgggacaaagtggggtgtaagattgtggatcctggccaggcacagtggctcacgcctgtaatcccagcactgtgggaggccaaggcagggggatcatgaggtcaggagatcgagaccatcctggctaatatggtgaaatcccatctctaccaaaaatacaaaaaattagccaggcgtgctggtgggtgcctgtagtcccagctactcgggagtctgaggcaggagaattgcttgaacctgggaggcggaagttgcaatgagccaagatcgcaccactgcattccagcctgggtgacagagcaagactccgtctcaaaaaaaaaaaaaaaaaaaaaaaaaaatcgtggatccttacgtaagaaggttcaggtttaataataacagtcacctaacctaacctgaaagtcaccatatttcaagaagacagaaacaccaacttacatggaccatgtttctagaattacaaaattggtcaatcttcctcgggcttctcccctggaaaacaacaacaacaaaaaggccctaagtcaagctgtgtccgaaagcactagaacgaataaatattttatcctccattcctatttctcaactactcctgctcacacgcacacttccacccttctcccgtcactccctttttccctacacacactctcacaaataaactggcagtgaacaggtggagtgtggatgaaaccaagctctcgcctacatcccagggaacctgcggcggaagcatgaatgccgagcacaggcatttctgccttgaagttgtggcttccagccagtcctccactcttgggataccaatcttggcctaggactgggcctctgatcctgctgtaagcaatcctcctcccctagtccacctttcagagctgagaagggcttgcatcatccaatccagaacctctttgtgaactcaggattgggtgcagtggggcaaggcatgagaactggaaaggatatagacagaattgcatgggcagtgttcagcattctgagttcaccaaaagccagctggggtaagtacagttcagaatagccatgtaatagaatacaaagtaatcattaattgttccagacatatgattaacagaaaaatcaggttacaaagcaggataaacaatacgattacatttgtaaaatatatgtatatagaaatattaagcaaaagactaatagacatcaatacaaaaatttagacaggtatatgcatgctaacagtgcttatctctgtattgtagccccaattttcttctttttgctaaagagtatgtcataattgtgactatgcccaggcatttaacttagaatatataattatattcacacacacacacacacacacatatatacacacatatacacatgtgtatgtatctatatatgtacatatttaaatgtacatacacattttttttcttgcgaggaaattgttctccaaattagatgaaagacatcttttatttagacattttcctttcaacgtggggacaaaaaaaggaaactctactgagctcttgtttttatgtaataaatttgtttccattatttcccaattcttgaccaacactaagatgtctatgtttttctatgtatgttagtacaatttctaaaaaaaattgtctacaagtcttcaactaatttcttgtatgcattaatgatggtcatatttctacatccgaattcaaaaataaaaataaaacagagttaacagagagtgagtacttttaatcataaaaaacaaaaaactgtgcctgtcatgaggatcaaaaagattaatgtgactataacaaataacatcagctagttctgacatcctttagctgtatctcaccaatataattagacattttcattatcaagactcttctctgaatgaacacaatgcagataagtggcatctggaaactacatgagaaaatctgtggaatgtacatcaccatgcttggttcccttcttcaccaaataactcattaaaatatcattttggatacaattcctacagaatgccttacaaaaaccctatcttagtatatgggattcatatacatgtaacattttcttgagtatcattgttcatagcatgaatactgcttaatggtatatcaaatatttttcttttcataattctttatagacatcattttattagctgcataatactttatcacttgagtctagtataatttgcttagtgatttccatattacaggacacttgatttatataagatcatttacagtgtcattccaggtatcacaatcttttgattctagactaaggtttttcaccctaggcactaatgacatattgtgctgtataatcctttgttggggctatagggagggttatcctgtgcacggtacaatgttcagcagtatccctgacctctatccactagatctaagtagcacctcccccatggtgtgacaaccaaaagtttttaaacatcacccccgctgagaatcaatgttctatctagatcaatggatccaaacctcatgggtcacatacagttttgatagtcttatgaaatgatatactatttctccctctaaaacccacattgataaatttccatagtacttcaatacattatttcaagagctttgtggtccccaagaccatacgtggagttacaagaactcagattaagaatttcagtcctacattcttgacaaaaatagaaaaaaaaaaatcctaaaatgtgcatagaaccacaaaagacccaaatagccaaagcagtctggagcaaaaagaacaaagttggaggcatcaaactacctgacttcaatatatactacaaagctatagtaaccaaaacagcatgatactgacataaaaacagacacctagacaaacggaacagaatagagagccccagaataaatccatatgtttacaaccaactgatttttgagacaggtgccaagaacatacaataaggaaaagacagtctcttcaatacatactgttgtgaaaactggggagtcatacacagaagaatgaaattagacccttttctcaaaccattatacaaaaatcaactctaaatggattaaagatttaaatgtaagatcccaaactatgaaacaaatagaaaaaaacgtacggggaaagcttcatgacattgatctgggcaataatttttttttctagaaatgacttcaaaagcacaggcaataaaagcaaacatagacaaatgaaattacatcaagctaaaaaagcttctgcacagcaaagtgaagagactacctacagaatgagagaaaatatttgcagtcatgtatctaataaggggttaatatccaaaacgtgtgaggaactcaacagcaagaaaacaacccaattaaaaaatgggcaaaggacctgataaacacatctcaaaagacgacatataaatggctacagtatatgaaaaaatactcaacattactaatcatcagggaaatgaaaattaaacctacaataagatatcacctcatatgtgttggggtggctattgaaaagacataagttaacaaatgttggtgagaatgtagagaaatgtgaaccattgcacactgttggtgagaatgtaaagtgacacagacattatggaaaacagcatggaggttcctcaaaaaattagaaatagaaccaccatatgatccagcaatctactactggatatttatccaaaggaaatgaaatctgtataccaaagagacacctgcacacccatgtttattgcagcactattcacaatagccaagatatggaatcaatctaactgtctatcaatgaatggataaagaaaatgtggtatatatgcaggtatatatacacaatggaaaactagccataaaaaaagggaaatgctgtcattcgcaacaacatggatgaacctggagaaattcatattaagtaagccaagcacagaaaggcagatgatctcactcatcagtggaatctgaaaaatgttcatataggccaggtgcggtggctcacacttgtaatcccagcactttcgaaagcggaggcgaaggccgaggcaggcggatcacctaaggtccagagttcgagaccaccctggccaacatggcaaaaccctgtctctactaaaaatacaaaaataagctgggtgtggtggcatgcacctgtagtcccagctactcggaaggctggggcaggagaattacttgaacccgggaggcagaggttgcagtgaaccgagatcacgccactgcactccagcctgggcaacagagtaagacactctctctcaaaaaaagaaaacacttgatatcatagaattagagaagagaatggtgtttacaggtcgggggtaatgtgggtgagggagggaagatggtgttggctggggaaatgttggtcaaaggatataaaatttcaggaagataagagaaataagctcaagaaatctattacacaacaacgtatctactattaataactactattaataactattctgtagtgctaagagagtggatattaagtgttctcaccacaaaaatgataactatgtgaggtaatgcattgctaattagctagatttagtcattccacaatgtacatatactataaaacatcatgttgcacacgataaatacatacaattttatctgtcaatttaaaaagaacttctgtcctagatcatttgagcaactcactcattttcttactatgcaagcagcaatcacaatgaatcacatattcccaatgctcctgtcctatagaaagtcaagggaaatgacctaaaatgaccacacgaaaacaaaagctaaaacattaaacatttattattatatgcctagcactgctctaagaggttttagagtattaattcattctaatgttcattacaagcctgagaagaccagaaacggacagaacaaacattccaacccagatactctggatccactcccctattcttaaccgcaacagcgtactgcctctcacagttcacacaaatagcccaaaatgcaaccggaactgccgaatctcacagagatctggcaagtattacaattatcatctcatggactctcccgaaaaatcctgactctggttgataccaatttctgtgcaatcactttccgattcctgaaagcctcacagacgaatggaaatcacccaaccatctccattcttccctacttggaaaaggaggcctgtaaagagtcagaaacctggcgtgtgattccacaaactaatcttcttttcaaagcagagtctaaaataaagctttaatataaacctctggaggactatttttataccagcttagaagaagagagcgtacaggaaggtgtgaacgatttgccaaatggctctgtgaatattaaatggcaaggtggggagcgggcggggtggggaacggctcgctgggaggcggcacaatgggagggggcaagaatcaatttgcatattctcctgaaattcactaaaaatttacaggaacctctatattctaaaatcaaaaacgcatttcttgaacaaatacaaagcacaaactcacccttgacttaagtgtgcaacaataacgctctcatcctcctctcggtccttcttttggataataatacgactggagaaggatacggcaagcgtgagactccaggcttttcttggagcgcagactaagtttgaaagcaccctccatggccacaacttccctcacttcgtacgaaatgagaaggaaataaaaggaggaggaatcggtctgagttcgaagctggttcctggggacagatctctgagggacgctgggttctcaacatgtagctgccctcctgggggaccctcaagaggcacttccagctctcatattcccaccccgagtccagatctgcgccttcttgtgcaaagcttcattctcggttcaatatctaacctccctactggggacattttcattcctctgctgcagcctctgcagctttgaaggggaaagacggaggaagcagcaggagcctagtaccaccggcacagtgacactcacacagccccagcaaaacgcactgcgtccacacgccgtcccggtcctgtgcacagggcctcacgcacacactcacacagtcccctccgtcactcaagatcgcgcaatccccatcctttgatgcccgcgcacacgcacgcctaaggatctggcagattccgtctgcgccccgggttcctcctctgagcgcctcgctctcgcccacccgcactgccgggtcggtcaggttcgagtcccagtccacgaagacctcccgcagccaccgatttcttcctaggacgtgaagaccttacccagctaggtcgtcaaccccaggagacaggaagtggaaccgctaattccggtgcggtggcctctgggaaatacagtcctgagcagaaagaacctcagaagtcttggtctatggtctgttcaggttgatcccagcatacattgggggctcctaagggacccgagcctaatggatttgtgggagttccagaccgtggggtgcagaggttgcggccacgggcgagaatccccatctgagaggagcgttgctgttttcggtgcgtcagggtaaattaccttttctctctatgcaaaagaatgcaaatgagcagaacttttaaagaagaatttaaagtaaaattacgtcaaaatgtagctgctttgacctcttcgtctcagatccgagcataggcttcccctttgtgctatttgaagggacttaggataaatttgaaaagcctgaactaaagaaatggttggagagactccgtctcaaaaaaaaaaaaaaaaagaaagaaagaaagaaaaggaatcgttggttttatactagaagaggaagtgtggtttacatgagagatttcagaatcaaatatacttgattcttcaagacaatcttcctgttatctggagagaaaaacgtgattcaggacggcatggaaacagataaaagtacacagagaattacttgccttatcttgaaggatgaataattaacacattttcttaaaacagtctaaataaatgccaaagggggtttgtttttcgtaggaaaagcttgatttcactgttgtaatctagcaacattgaactttcaaaatgatttttgtagtttcctatgctatataaagcggaaacgtggaataatgaagagcaaaatgtcttttcattcccgactgtgacagaaaacagatagcaagataacaaacttaattggatcaatgatcacattaagtgtaactggtctaacaccttaacttaagaaggttgtcaggttggattttttttttaaaagtcagacccaaatacgtgctacctacaggtaatacttaaaatataaaagcactaataggttaaaagtaaaaggatggaaaaatatataaaatcctaacactagtcaaaagaaagctggagtggctatattaaaaacaaagtgacttcaccaaaaagactatatcagggataaagaaagttacatcatcataatgatgaaggatacagttcatccagtggaaagaacaaacctaaattatgctcttaatacagcttctaagtatgtgagtaaaaacctgttagatcaataaagtaacagacaaatccacaattataatcagatatttcaacatatctctcttggtaattgatagaactaatgcagaaaagcaacagggtatagattatctaaacaacatatcaacctgcttgatctcatttacacttctggaacactcttctcaaagacagtaaaattcatcttaggtggacaggagacactttccagcgtataccatattctgggccataaagcaagtctccataaatgagtaaatggactcaagtcatacaaagaatgtttttgacaaaaatggaattaaattagaaatcaataacagctcactatatattgtccaaagtagtaaaaatttgaaaatgtatgaatactatgataattgaaattatataatgtttgaaaatttcctttatgagtcataattttctgttatatcctaaagggtaaacaataacatatttgcattaaaacaaaataatgtttttgtagtaaggaaaaaattttaagctatctatattgactatgcattaaagagcagaataattatttttggtatatattccaatgctttaatcaatttcttagccagtatcaccatatttttaaggattttttttgacacagtctattatttttaaattttgataaaattgtatgtaatcctcaatgctggactttatggttaataaacttgaaattatagctaccttcaaatggcgcttctctgaacaccataccttttaaattgagatatatactctgcatatactaaggtaatcagaagtcttagaatatagccaatgaaatggaaaatatcctcatgagtattgtgaatatggaatattagattgcaaatattttagcagttgatgtattttgccttcacagtacatttctacttttttttttgccacttagtctaggaagggtacatttatttaaaaattattcctaaagccaaacaaattggctcaatttatgatacctttgaatgttaagccaaatttaggtgttacggaaacataaaccttctcaattgcattccattctaacacaaattgtaaatgtatccagttagaaatgggagcaccatcaaaagactactgccatagctgaagaaagtcctatgcaaaattgaagaatttcaaaattaaatcctgtatataatacgttagttcatgactttatttattcagtttcttccttaatttgtaggactaaatcccattgtcttcatgttggcaagttctgataactgaaattctgttgaatttctatactgaataggagtaaggatagatgatatcactgttttgtgccaaatcaacagaatcttaaacaaccaaagggttaaagaacaaataaaaagagaatttagaaaacattttagataaatacaaatttactaaagttcatgagatgcttactgctcagggaaaaatttatagctctacatgcctataaaaaggaggaaagatgtcaaatcaatgacctaactgtatacacttaggaattagaatatgaaaaatagaaaaaaaaaaaaagcaaaaccaggagaagaaaggaaataataaagataaaagtgaggttagattaaatagaaaatagaaaaataatagagaaaacttacaaaattaaaagctggttctttgaaaagatcaaaaaaagtggcaaaactgtagcaggactgaacaagaaaaaagagaaaacatcaaaattactaaagtcagagctgaaagtggagacattactaaacttacaaaaatgaaaatgatgatagaagaaaattataaacaattgtatgtcaacaaaataacctaaatggaaaggaaaaagtcctagaaacacacaaactatcactgactcaagaaaaaatagaaaatcttaacaggagtgatgtcagcaagatagaagaatgggactttccagcacttagctctcacagaaacatcaatttaaacgtatatctatgcatgaacaaactttcacaggagctaaagaatccaagtagctcactcagaggggatgggaatgaagcagctagtagacaactgtctctgagacagcaaaaatgttggatttagcaaagatctgaaagcagctattttaattatgttcaaagaactaaaacaagccatatgtaaagaatttaaagaagagtatgacaataataccctgccagagactatcgacagagagatggaaattattactgcaatgaaagaaccaagtagaaattctagagttgaaaagcacaataactgaaatgaaaaattcactagaagaactcatagcagatttaacctgaaaaaagaattagtgaacttgaaaataggtcaagtcaataaaattatgcagtctgaagaacagaaagaaaaacagaaggaataaaaatgaagaaagcatcagaggcatgtagtacaccatcaagcaaaccaacatacatataagaggagggtcagaaggaaagaaaaagaaaaaatgcttgaaaaataatggccaaactctctgtgaagttgatcacacacatgcacacacacctacatttacaagaatgtgaacacactccaagtgggataaacccagatattaatacttaatcaacatgtctcaaggagagctaccccagagtcaaattgtcagaagccaagaacaaagggaaatcttgaaaacagcaagggaaacattattcatcatataaacgagattctcaacaggactactggctgacttctcatcagaaacaacagagaacaaaaggcagtgggatgagattcaaagtactaaaacaaacaaaaacaaaaaacaaaacaaaacaaaacaaaaacaaataaaaccctaccagtcaaccaagaattctatatccagaatattctctctcaaaatatagataaaataaagagaattgcagataaggactgaaagcctttgttgctagcagactttcctaataagaaatattaaagttctttagaatgaaggtgatggtcactggaatccacacaaagaaataatgagcactgattaaagtcattacataggtaaataaaagataatatacacttttacttttttattttaactgattaaagataactgcataaaaccataattatacaattgtattattttgttcataatgtataaagttgtaatttgtgtcacattcatattactatgatagcacaaaggaagggagctatattggagtaaactttctgtatactattgatattattttatttattttgatttttaaaattttatttctaattttttgtagagacagggtctcactatattgcccaggctggtcgtgaactcctgggctcaggcaatccttccacctcagcctcccagagtgctgggattacaggtgtgagccaccatgcctgacgactactgttattattttagcaataatctcaattagatttttttaagctaagatatacattagttctttttaaaagctgaaaacagacggaaaacaaaaggatggaaaaagatacaaatagataccatacaaatggtgatcagaagagaataggaatggttatactaccatcagacaaaacaggctttcaaaatgttactaaagaaaaagagatttatttaatgataaaagggcaagttaattagaaaaatataactacaatgaacgtatatgctcctaaaaacaggagactacatacatgaaaggaaaactgacaaaactgaagagagaaaatgacagctcaacaatagaaggtggagattttaacactctattctcaatacatacaacaactagacagaaaatctgcaaggatatagaagacttaaacaacactacaaactagtttgtcttaactgatggttggttgaacactcaaccaacaataaaatacatactcaacatgcaacattttctaaactaaacaatatactagacttatatatggcaaatcataatattttttataagtaagtcatgctaagtatattctctgaccacagtgaaaataaaattagaaatcaaacactgaggaaatttgggaaatgtaaaaatattttgaaattattcaacacattgttaaataccccatggatcaaagaataaattataagagaaattaggatgtattttttattttacttcctaaaaatagagatgagaatctcactatgttgatcaggctggtctcaaactcctggcctcaagcaaccctcccatcttggcctcccaaaatgctgggattaccggcatgaaccatcgcaccttgcctagaatgtatttttaataaaaacaaaaacaatccaaatttttggagcagctaaatatgtttttatttttagctttaaatgcctatagtgctagaaaagaataaagatgtaaaatcatttggtagacttcaccagtgaaaccatgtagtctttggcttttctttgttaggaggtattagattgctattcattcttcttactggtcataggtatattcagattttctatttcttcattattgagtcttagaaaggtgtgtgtttctagaaacttttccattttgtctaggttatcaaatttattggaataccgttgtaaaaagtactcttgaataatgctttttattagtatacagttggtaggaatggaatgttccctgtttcatttctgatcctagttatttcagtcttcctctcttaatcaatctgcctaatggttctcaattttgttgagcttttcaaataaccaactcttagttttactaattttctctattttttattctctaatatgttaatctcaagcctaatattttcatttccttccttctactagcttcagatttagtttcttcttcttttctagtttctaatggcataaagttagggggctgacttgaaatctttcttcttttttaatgtaaacactaacagctataaaattcccttaacactgcttttgctgcatcccataaatttggtatgttgtgttttcattttcatttacctcattttcatttgttttgatttcttctttgatccactagtttagagtgtgcttagttttcatatacttgtggattttacagttttacttatgctattgaattctagtttcaatattttaacattatgacttcttctgtggcctaagacatagtttatcctggataataatccacatgcacttgaggaaaatgtgcactctgctattgttgagtggaaatgttatgtatatatgtgtgttaggtccaattggttcaagtcccctatttccttatttatcttctgtcctgttcctctacatattattaaaagtagtgtattgaagtctcctactattattgcatagatgtctatttcttccttcaattctgtcaatgtgtccttcatatattttggagctcaggtgtttagtgtatatgtatttgtaattgatatatcttcttggtaagttgacccttttattatatattctttgtctcttctaaccttttttaacttatagtatattttgtctgatattaatacagccatgcccactctttttaattgctgtttgcatgaaatatcttttttcttcttttcactttctttttgtttgttttttagacggagtctcgctctgtcacccaggctggagtgcagtgacacgatctcggctcactgcaagctccgcctcctgggttcacgccattctcctgcctcagcctcctaagtagctgggattacaggcgcccgccaccaagcccgactaagtttttgtattttcagtagagacggggtttctccatgttggtcaggttggtctaaaactcctgacctcaggtgatccgcccgcctcggcctcccaaagtgctgggattacaggcgtgagccactgcgcccggcccatcttttcactttcaaactatgtgtgtccttagatctaaagtgactttcttatagatagcatttagttggatctcgttcatttatcgtctcccaatctatgtcttttgattgccaagtttgatccgtttacatttaaagtaactattgataaggaatgacttatttttgccatgttgtttttttctatagttcacccagtcccacatttcttttcttactgccttcctctgtgttgattttctataataacacatttaaattttttattcattgtatttttgttattttcttaatggctgctgtagggtttattatatacatcttagaatcagcttcagaataatactaacttgatcccagtgagatatataaatgttatttatatagttctaatctatcctacttttcaattctattattgttctacattattatgtctacacatgctacagactcaaaaatacattattatacttattctgtataggtttatgtctattaaggatggaatagagtatatatatatttatatggtatttttgatatatagctttttatttactatttctacttctttttatttgttcctatgaattctagttactatcgcgtatcatttctttactccaatacaactctgctgtcatttacttcctttatgctgctattgtcaaatatattacatttccatgtcatatggccaataatacaattatgtacatattatacaattgctttttaaatctattaagagaaaaaagtaaaagaaatgtgcatttatgctgccttttataattaccattttgtgtgtgtgagacacagagtctcactttgctgcccaggctggagtgaagtggcatgatctcagctcactgtaacctctgcctcctggtttcaagcgattctcctgcctcaccttccgagtagttgggactacaggtgcacaccaccatgcccagataatttttgtatttttagtagagacggggttttgccatgttggccaggctggtcttgaactcccaacctcaggcaatctgcccgccttagcctctcaaagtgctgagataccaggcatgagccactatgcctggctataattacctttaattataaatattaattttgttctttttaaaaatgtgattttaaattttcatgtgttttacttgctttcagtattaataactttttttttttttttttacaatttctcatatggcagatctgggagggctttgtttcaccttttttttgaaggcagcattactagaaataagatcatggttcacaaagcttttgtcctttgagtactttgaatgtatcatcccactgccttcatcccctccattgtttctgatgagaagtttgctgttaatctattggggtacccttgtggcacattgtttttctcttacagctttcaacatttcctttcacttttaacatttttactatgacgtgtctgtttgtggatatgtttgcattcattctgttcacagtttgttgagatgcttgtgagtatagattaatgtttgttcaataaattgtggatgtttttagccattatttctttgaatatttttgtgcttctctttctcctcaccttatggtattctcattacatgtacactggtgcactgaaaggcgtcctgaatttctctgaggctctgtttatatttctttgttctattttctcatcctatttcttcattttcctattctattttctaatgggaagatggaattgaggttgcataatttctattgatctatttgaaagttttctaattcttctgccagctcaaacttatttagcccttctaatgattttttatattagttattatagtcttcaactccagaatttacatttggttcatcttatgatttcctttattgatattctttatttgatgagacattatctttgtattttcccttactgctgtgaatatatatataatggctaccttgaagtttttgtcttttaaatctgatatctgttccctgtcaaaggccatttctgttgcctgcttttttcctgtttataagtcgaacatttcagtttctttgtatgtcttacaatttcttgttgataagtggacatattaggtaacatactatagcgattctggatactgattccctgtccccttcttcagagtggtttttgttgttgttcttcagagtggttttgttgtttgttttgttttgttatttgttttctgctttgactaagctattttagtgaagtagcttgcagtgggaagcattttgttgttcttcagagggtgcagccttggacatatgcagagttactcgtagttatttgttttgtgttttcactaagctattttagtgaaatagctggcagtgggaagcattttgttgctcttcagagggtacagccttggacatacgcagaatataccctggtatggttttaaacaggagtctctttgaccatctttccctgatctctctgttaagatgtttgtctcctttggtattatttctagcccactaggctccactggcttctgtctgatcagtctactgttctccacaagtccttggagcattaattactaagcagtttggtataatttaagccaagcagggctagtttttgaggccagtctttaaggtttcttttgaccttagaagggctccttagctgtgtcttcccctggaattacctgattaactagctgacttacggttcatgttgtttttaattaagggaagtttctgacactgtttcaaataaattccattcttcttgagagagcttcagagctctattcttatacactgtctctccctctggacaaaatctctgaaccaccattctgggcaatgggctgggtggtagccattttgtttctcttgtgaaacctctgccttacaagcaagctgaggcaaaggcaatcagggcccaaatctgagttcactgtgcctgggtagagcttccaacctatgggtgggagcgggggaagcaatggagccccaagcctcttggttgcatcaccaggaatttagcctcttcaactgagaggaggtgggaataagaatccctggaagcctgaccctcctgttgttataaaacttgattgagagctggagccgcataatcttggcagcatccacccagtgtgaagcttccatcaaactgagctgtgaagacaagaagagagtgggctgtgtcttaaataccacgaattctcactgctcttaccaagttttagtagactttgttgttagatatttcattcactgtatactctttgcactctttcagatctcaaatagtaaggttttaaaaatagtttttgttttttgtttttttttcacttttacttgtcttgctggtaaatgagcctgcagagtctccctatcctatcatccagaagtggaacttcatacagtcatctaacaatcgtttagcattttctgtcatctcattttggagaatcatagatgtggcagaaatacatattcttgaagaaaaaaaatgtctcccttacaggtactgtggttttaatagggtgtgggataagtacatgacaacatgcatgggatagatgctctgctctctgcagatctgtgcttttgagctacagaacatagaagaatatattgactgttcttagtcttaatatatgacaatctaggtgtatcatttaagattaaatttggttgtgagtaaaatagtaaaactgcatcaaattaaagtggataaaacaagataaggttaatttctctgtcatataatatggatgtaagcctgatattgtggccttgctccaaaccaatcatgaattcttccactgctggcatcagaatggtatgagctctcagacttacacagaactggggaaaatcgtaaagaatttctggatatccctcacccagatttctcaaatattaatatattcagccagctgtgttttaagagaggtttccagaactgccaaaaatattcacttacatcctactggccataagttatgtcacatgacaacatcttggaaaaataaatgcagtgcttactctagatagtcatagccaactgttaataaaaattactgattctataatcctggactctaatctgtaataacagactctgacccgctggggaatccaaggagaaagtttcactttcagcaattacaaataaccacagtgcaaccctagagaccacacttgtgcagaagactcatagaaatggaatggtatcctagaaattagaacacacaggtctctcatcccccatactgcaaactggattatcataataccctataaaaggatgacagaaggccaggcttggtggctcacgcctgtaatcccagcactttgggaggccgagacaggcggatcacgaggtcaggagatcgagaccatcctggctaacacggtgaaaccccgtctctacttaaaaaaaaaaaaaaatacaaaaaaaattagctgggcatggtggcgggcgcctgtagtcccagctactcgggaggctgaggcaggagaatggtgtgaacccaggaggcggagcttgcagtgagccgagattgcgccactgcactccagcctgggcgagagagtgagactctgtctcaaaaaaaaaaaaaaaaaaggatgacagaaatcttctgtccagtttttttctggagaatctatgaacattcaaaatattatctattgtcggctgggcaagatgtctcacacctgtaatcccagcactttggggtctgaggcgggcggatcacttgaggttaggagttcatgaccagcctggccaacatgctgaaagctgtctctactaaaaacacaaaaattagctgggcgtggtgacaggcatctgtaatcccagctacttgggaggctaaggcaggagaatcgcttgaacctgggaggcagaggttgtggtgagccacgactgcaccattgcactccagcctgggcaacaaaagcaaaactccatctcaaatataaatctatccatctatctatctatctatctatctattatccattattgaatgttcttcataacactgctcagaaacaccatgacaaatttgaatcagaccaatatctccaaaaatgggcaagcagattaatgtgtcatttcaggcaggccctagcaggagataaacttctcagctatcaccatacataaaaccttataattcaataaaatatcaaatgcaaacaagagcagatcatagaaatgtaagttgagaaaaatcagagtgaacttctgaccttacaatgacattttctactctgaaactattaaaagaattctaacaaaaccagcatcttcttccatacctgtaactgccatgtgcacccatagcagccagatttcttggtctcaaaggctcttttcctctaaatagaaccaggacaccctacgagggtactgaatcatgggttgattccatgactcaggacaagaggcatggggaacatggaccaacaaagaaggatcagtctaaaacatcttcttaggacctgaacacaatattcatttaaaaaaaaagaaaaaaagaagtcaaaaaaacaaatgtaactggactcctactggctacacatcaaattatcataattactacagatgcttctcaacttatgacagcgttatatccaaataaacccatcacaaattgaaaacatcatatgccaaatgtgtatttatgacctacaatattttcaacttaacatagccccatcttagtttgaggagcatactctgactgagtatgtcttagtccattttgtattgctacaaaagaatatctgaggctgggtgattaataaagaggtttatttggctcactgttctgcagaatgtacaagaatcatggtgcagcatctgcttctgctaagggtctcaggctgcttccactcatggcagatgatgaagggagagccagtgtatgcagacatcacatggcaagagagaaaacaagagggtgagggaggaggtgccaggttcttttgaacaaccagctctcacaaaaattaacagagcgatagctcactcacccctcaatccagagagggcattaatttattcatgagggatcttccaccatgacccaaacaccttccattaggccccacctccaacactgagatcaaacttcaacatgagatttggagggacaaatatccaaactatagcaacatatcacttttgtaccatcataaagctgagaaattgttagttgacattgttggggaccatctctataatagttcattggaacaagtctgttaaaaatcatgttcatactgatacacaaaacatgtaattatcatacatctagtatcatgtcacactcaaaagataaatggttataaattttacaaaaggaggctgcagttaggaatgtttaatttactgtttgttgatagtaggtgagaaagaactgttcatatgccttttttccaccaacttgatgtttgtttagaaggtatagttacctatttgtattgatctgtaaaagcaagatggaacaaatacagaaaagtttgagtaagccagacacttttggaaggggcagtgtactagaaatgggaaaaatgtatccatattaacggctactcgtaactcctatgaatcaggtaaaaggagggccaaataaaaatcagtgctagggagtgaaggtcagactcacaaaccaaataaatgaaatattcaatacatttcacaataagaaaataccccaatgtcctaatgaaaaagaataaaaacacatactcgatcctcttctcctaggagatgaaatatattgttttaaaaatgagttactccaataagatatgaataagcaatatataaatatataataaacataacagaccagttagatatataatagacaacagattaaatactgctgactaagcacaacttaaggggattatataattaaatgtatccaaaaaaaccattattgaattgacctgtcactttctaatacatctttgttactaaaaatttaagcaacttagtaaccatgactctgggtcatctgatatcataatgtggttcaaggtccaccaatcttctgtttctttgattgtatttccttgtttcaggacaggtaaaaatgttaatatcataataaagaccaaactgtccaattaccaaaactgtgaagcagcaacaatgtcaaagaattacaaataaaaggaataagaattttttgaaaagcaactaaaattgagaaaattctttttataagtgaattcagtatgttcactgagcttgtaagcaaggaaatagtctatggatgccttctctgcttttaaaagtagtaggtgatttttaaatttttacataattggtttgtaactttagcaaatattttaaagtgttttattatgtttgcaaagggactgtgacttccaacttagaaatcccaagattgcatgatgatagagtttcactggaaggcctcctgggatctcttttttatgacaattcttaatgagataccagaatgtgcaatgacccataaaggagttgtgctgggttaatacccagggaatctgttgagttcaaaaaagaaagtcaaagagaatcaatatgaaaaagatgaaagtggaaataaaaaataggaacatgagactagaaagccaggttttaaatagcctcgttttgtaagatttataagatcactgcattaacaaaacctgaaaaatgtttagaaaattataactttacctatgattatagatacaattaaatgttaagaaatagaattaagtagtctatcaaaagcataataatctgataaggatatattcacaaaaagaagaaagctatcaatataaattatcattttatagatttttaaatgcactggaataaaatcacaaaggattattattgatctttaaaaaagttaatctctctaattcatgatgccacaatggtatcatgttttatagcttgatttaaaggcttaatttttttcaaagtttatcaacagctcacataccagccatgatgtataggtgctgatgataaatgctgaacaaaaacaaggttccagacaaaataatcttggctccctgaataaactagagggtgctaattttgtactgaatatactgtcagccttatcacacaagttgacttatgttgacaaccttaatggcattcatttttgaatagtctatttcaattttcattttgtattcaatccacagctaaaatacacatgattataaatattcagaggtcaaagtctctccatagattatttatgcactacaaattagatctttacaatggacttatggcggttaccagcttacccaaatgatcaaacttagtttcactaatgcaaggacctgtacttaaatgttttctgacagtgaaatatgccatacaaatagcctacaaagtattcttccccaaaatgtttaatctgacctaacagagcctctggactcaaattcccttgtacagaatatgcaacaaagagaacaacactaaatgacactataaagaaagaaatctaaacacatagacaattttcctgggctaatcaaaattcaatctcattttttaagaatgaggagatggaccaggccttttcaaaactatcaagcagatagtcagggcctgtgaagtgtgccaaagaaataatcccctgcactgcaggccatacatttcaatctctgtatctttaacctccttgttaagtttgtcttttccagaatcgaagctgtaaagccacaactcattcttcaaatggagccccagatgcagtccatgactaaaatctaccgcggacccctggaccggcctgctagcccatgctccaatgttaatgacatcgaaggcacccctccagaggaaatctcaactgcacaacccctactacaccccaattcagcaggaagcaattagagcagttgttggccaacctccccaacagcacttgggttttcctgttgagagggggtactgagaaacaggactagcaggatttcctaggccgattaagaatccctaagcctagatgggaagttgaccacatccacctttaaacacggggcttgcaactcagctcacacccgacccatcaggtaagaaagagagcccgctaaaatgctaattaggcaaaaacaggaggtaaagaaatagccaatcatctattgcctgagagcacagcgggagggacaatgatcaggatataaacccaggcattcgagccggcaacgactaccctctttgggtcccctccctttgtatgggagctctgttttcactctattaaatcttgcaactgcaaaaaaaaaaaaaaaaagaagaatgaggagaaaggagaaatgttctaggtcagtggctctctaactctggttggtatcacaatcacctggagaaataataaaaaacatagaggcccagaattataagctagggcttaagcctctgtagctttactaagtgccactgttgattctaatacctaccaaaatttgagcgcctacattcataggatttccaggctacaatacactaaagagagataaccaaatgcaatgcagattctgcaatggattctcctttgaatatgaatagctgtaaaagatggtttggaagccaatgaagaaatctgaaaatggaatgatattacagaattatgaatactttccttaacggtaattatggtacaatggctatatgatattgtctatattgtcttcatgtttggttgatacacacgttgattaaataaagggtaaagtgtcatgatgtctaaaacttattctcaatggtacaacaaatatacaaaaaataaacgtgcaaattgttaacaattttgaatctaggttggggtatatgattgtatatttgactattctttcaaaacccacaacaagtatcaactaggtttaccatcttttatgggcagaatttgtggtatcccaaagcaattacaatagcaacatcaaaaatcactggtcattgatcaccatgatagatatataacaatgaaatagtttgaaatattctgagaattaccaaaatgtgacataaagacatgaaatgcacacctgacgttgggaaaatggacctgatcgtcttgctcaccacagggttgccacaaaccttcagtttgtataaaacacaataactgcaatgcacaattcagcgaggtatgcctgtatctggtaaattatttcatagggagtacattgtgaacatgacaactaccctatattcctcattcaaagactttctcacaagaattatcttctccgaactctaaggtatttagtgtggctataaaacgccccacattccttacactcaaagatttctcagaagtatgaatactcagaagttgagcaaatcccaggccatgatgaaagttcttcacacattcttttatgttcacaagatttctcatcaatatgagctctctggtgttgagtaaatttttcgtacacagtgaaggcttgtccacactccttattgtcacaaaatttctaactattctgaattttctgatgttgagacagctgatcatccacagcaaatgctttcccatattccttacattatagcgtttctcaccagtatgaattttaacatgttgaacaatgtttgagctacaactaaaggtcttcccacattctgtacattcacagggtttcataccagtatgaattctttgatgtgcagtcaggaccaaactaaatctgaaagttttcccacactccttacattcatagagtttctcaccagtatgaatactctgatgttgaacaaggtttgagccactattgaaggccttcccacatttctcaaattcaaatggcttctcgccagtatgaatgacctgaagtccagcaagctgtgtcagaaaactgaaggcctttccacattctttacattcaaagggttttttaccagtgtgaatttggtaatgttaaataagtggtaatgatatctaaaggtcgtcctccactccttgcatacaaagagtttctcactggaatgaattttctgatgctgaataacgtttgaaccacaaatgaagcctttcccacaccccttacattcacatggttttacaccagcacgaatactctgatgttgaacatggtttgagacacgattaaaggactttccacattccttacattcaagatgccttctcacctgtgtgaatgttcttatggcgattaagctgggtgggaagactaaaaacctttccacattccttacattcaaagggtttctcaccagtatgcaatttctgatgtcgaataagttgcatatgaagtcgaaaggctttcccacactccttacattcaaagggtttctcaccagtatgcaatttctgatgtcgaataaggtgcatatgaagtcgaaaggctttcccacattccttacattcaaagggtttctttccagtatgaatacttcgatgttgattaagatttgaaccacgacgaaagaatttcccacattccttacattcaaatggtttttcacctgtgtgagttttctgatgttgggaaagttgtaggtaaagtctaaaagccttcccacactccttacattcatagggcttctcaccagtgtgaatactctgatgttgaacaaggcttgagccacgattgaaggccttcccacagtcttgacattcaaatggcttgtcaccagtatgaattcgagaatgttcaataagttggcaatgatatctaaaggccatctcacattccctacatacaaaaggtttctcattggaatgaattttctgatgctgaataaggtgtgcaccacgattaaagcctttcccacactccttacattcatatggttttataccagcatgaatactctgatgttgaacaaggtttgagctacgattaaaggacttcccacattccttacattcaaacggtttttcacctgtgtgaatgttcttatggcgattaagctggttgagaagactaaaggccttcccacattccctgcattcaaagggtttctcaccagtatgaatcttctgatgtcgaacaagctttgtcagaagagtaaacgcctttccacattctttacattcaaagggtttctcaccagtatgaatttggcaatgttcaataagttggtaatgatatcgaaaggccatcccacattccttacatacaaagggtttctcattggaatgaattttctgatgctgaataaggtgtgcaccacgattaaagcctttcccacactccttacattcatatggttttacaccagaatgaatactctgatgttgaacaaggtttgagctacgattaaaggacttcccacattccttacattcaaacagtttctcacctgtgtgaatgttcttatggcgattaagcagggtaagaagactaaaggcctttccacattcgttacattcaaaaggtttctcaccagtatgaaatttctgatgtcgagtaaattgtatgtgaagtcgaaaggctttcccacactccttacattcaaagggtttctctccagtatgaatactctgatgctgaataagatttgcactacgactaaagtatttcccacattccttacattcatacggtttatgtgtattgcaaataagagaagcatgaggagtatgagtaggcagtttttcatagctgatcatcttttgattgatatttccttcttgatatccctgtagtccctcaaattgtctatattctgagtcatttctaaaataaaaggcctcaatgccaagagttgtacttatttgctttataacctgtttgggtaaatttacttcagaggtatcattttctggagatactttctcaggtccatattttaactccaaatctgaaagaaatgaagaaagcaaacctattttattttcgtataacacacatgcatacaaagtccttttgtcaactgaaaccatcaattcaaaccaataaaacctttattgattttattagccaaaaccaacaaagttggtagatagaacctttctcatatcacttctgtttccagtggaagcaaatgcacatctgagccagcctggttatgtacatgtaaaaataggaaaatgaaccacagaagattgaacctaactaggtcaactatctgttgaaacatattgatatgttctataggacttaagaccatgagacccatagtttcatagtcagtaattagaatgtccaggatacaatccaaatatactggcatatacaagaaaatttcaactcacattggaaaagaaaatcaacagcagcattctgccaggggcctggggatcaccccacccctgcttaccacaagaaccagcacgtacaactggggggcctaaggtcaggtccagcagacccagctctgtgcccaagtccccaagcacaccatctggggacctggggatcaccctgatccatctaccacctttgctacctaagcactcatcacagaggcctaaggtcagacacatacaacctgctgtttcctccacaactggtacccacctgtactcacaaccggaagttctggggactggcccacccagcccatcatagtcacctccaacactaagcacttactgcttgggagccagaaggttgtcctgttcactactactaccatcacccatgccacacttgctgcccaagaatccaagaacccatccacctacccagcataccactaccactgccagcactatccaaactacgaggaggccaaagaatcaacgtgcctagacacactaatactagtaccagcatacactatgctggggccccaaaacaggcacatctggactgccactgccaccaccagagcccaaggacttgcctaccttgtgtcctcgtgctaggccattcttgcattaaaggaatacctgagactgggtaatttacgaaaaaatgagtattaactggctcatggttctgcaggttgtacatggcgctagcatcttctcagcttctggggaggctttaggggccttttactcataaaagaaggcaacacaggacaaagaatgtcacacagcaagagaaggaacaagagagagaacaagaagaagtgccatatacttttaaacaaccaggtcttgcaagaactcacttactattgtgaggacagcaccaaggggatggtgctaagccattcatgagaaatccacccctatgatccaattacctcccaccaggccccatctccaacactggggattacatttcaacatgagatttagaggggaaaatatctaaactatatcactcctcatccccaataaaacttcaccataccctccactaaccatcacaaccaaagccaaggaagaaatcacagacaccaaaggcactgtttacagccaaaaaaaaaatcataacactacataacaacactactgcacacgcccagaatcaaagcgaaaatgccctatccaaccctattaaccataggtacatctttaggaaaaaagcctcccctacaaaagcaaattcaaaaaaatgagaataaacacaggaaataacaaaaaaaaaaaaaagagaaggaaacttgacatctccacaggaacataataattctccagaaacattccaatgggagaaaaatgctatatcctagcaaaagaattcaaaataattatattaaagaagctaagtgagatacaagagaattcggaagaacaatacaaacaaatcagaaaaaaaaaactcaggataagaagaagaaacttaccaatttcattataaaaaagaaccaaacagaaattctgaaactgaataattcattgaataaaatataaaatacattcaaaatcttcaacaacagactagatcaagtagaagaatctcagaacataaagccaattcttttgaaataacccagtcagacaaaaatagaaaaacaaaaaaagaagaagaaacaaagaccctatatgggacatcataaaacaaccaaatatttgaaattttgaggtcccagagatgaagagaaaaaataaaggaaagaaaatctatttaatgaaataacagctggcaactttccaattctagcaagagatgtagacatccagatacaggaagctcagagatacccaaatacataacaacacaaaaaggtcttctccatggcacattatggtcaaaatataaaagtcaaagacaaagagagaatactaaaaacaggaagagaaaagcatctagtcacttacaagggaactctcattagccgaacagcagatttctcaacagaaagaaatgagagagaatgaaatggtatattcaaaatgttgaaagaaaaaacttgccagtcaaggatactatcctcagcaaattataaaacataaatgaagaagaaataatctttcccaggcaaaagctgagggcagaccagctctacaagatatgcttaagagtcctacacctagaagtgaaagaatatctgccattgtgaaaacacacaaaattataaaacccactgacacagcaaacacaaataagcagaaagaacccaaatgttacccctatagaaaacaaccaaaccacaatgatgaaaaataaaagagaaagaaaggaacaaaggatacacaaatcaactagaaatcaattaataaaatgacaagaataagccctcacatatcagtaatcacattgaacgtaaatggattaaacttttcatctaaaagatatagatggaatggattttttaaaaagtgacccaattatatgctgccaacagactcatctcactggtaaagacatatatggattgaaagtaaaggaatggtaaaagatattccatgcaaatggaaaccaaaagtgagcaggaatagctatatttatatcagacaaaaaagattttaagtcaaaagcagcaaaaaagagacaaagaagatcactgtataatgataaagggatcaattcagcaagcggatataacaattctaaacatactataatcccaacaccagaacacccagatatataaggtgaatattattagatcaaaagggagagagatgtattccagtgcaataatcattggggatttcaacaccccactctgaattacacagatcatctagatagaaaattaacaagaaacattggatttaaacttcacattagacaaaacaggcctaacagacatttactgaacatttcatcaaatagctacaaaatacacattttctcattagcacacagaacattctctaggatagaccatatgttaggatgcaattcttaacaaattcttcaaaaccaaaattatatcaagtcttttctcagacatggaatagaatgagaaatcagtaacaagaggaactttggaaactgtacaacacatgaaaattaaacaacctgctcctatataaccactgggtcaagaaagaacataaggaggaaattaaaaaatttcttgaaacaaatgaaaatcagaatacaacataccaaaacctatgggatacagcaaaagtactgctaagagcaaagttgatggcaataaacacctacattgaaaaagcagaaagatttcaaataaacgatctaatgaaattagggcagaactaaataaaatacaggctaaataatacaaaagatcaatgaaatgaaaggttgttttttaaaaaacataaataaaattaataaaccactagctagactaaccaagaagaaaagagaagaaataagcaaaatcagaaataaaaaaaggagatattaccactgacaccacagaaacagaaaagatcatcaaaatagaaaagctgaacaggccaatgagtaatgagattgaattagtaataaaatgtcacccaaaaaagaaaactccaggactgatggcttcactgctgaattctatctaccaaactctcaaagaactaattctcctcaaactattccaaaaaatttcagagaagggaattctccttaactctttctatggagctggcataccatgaaaccaaaaccagacaaggaagaaacaaaaaaagaaaatagttctagcctaaagtcacatgaatgcctatgtttattgtagcactattcataatagcaaagacatggaatcaacctaaatgtccatcaatggttacctggataaagaaaatgtggtacatatacaccaaggaatactatgcaaccataaaaaagaacaagattatgtgcagcaatatggatggcattggatgccattatcctaagcaaattaattaaggaacagaaaaccaaatactacatattctcacttataaatgggagctaaacaccgagtacacatggacacaaagaacagaaaaacagacatcagggcctacttgagagtagagggtgggaggacgaagatccaaaaactacctattgggtactatgcttattaccggggtggtgaaataatctgcacaccaaacccaccacaacatgcaatttacccatataaaaaacccacttatgtaccccttggacctaaaataaaagttggaaaataaattaaaaataaataaataaatggtgctggaaaactggatatccgtatgtgatagaatgaaaccagacccctatttctcaccgtatacaaaaatcaactggaaatggattaaagacttaaatgtaagactcaaaactataaaacaactaaaagaaaacataaaggaagtgcttcaggacattgacctaggcaaaaattttctggttaacactgcaaaagcataggcggcaaaaacaaaaatagacaaatgggactatattaaactaaacgcttctgcagagcaaaggaaactatcatcggagggaatagacaaaattaaatgagagaaattatttgcaaactatttctctgacaagagactcaaataacaggaaaaaaaaaaaaaatccaattaaaaagttggcaaatgggctgggcacgatggctcacacctgtaatcccagggctttgggaggccgaggcgggcagatcatctgaggtcaggagttcaggaacaacctggccaacatggtgaaaccccatctctactaaaaatacaaaaattagccaggtgtggaggtgggcacccgtcatcccagctacttgagaagctgaggcatgagaattgcttgaacccaacagacagaggttgcagtgagccaagatcagattactgcactccacactgcaggacagagcaagattccaccttaaaaaaaaaaaaaaagtttaccctgggaaaaaaagagggaacttactccactaaaaggggaaggaaataagagaacagaaattaggtgattagtaaatgatgaagttccttggtgatggcttctgctgtaatctttatttccttcccaggtcttgggcatttttatccaacaggacttgggtcactgaagaaagcttttcaaaccacatctcaagtgtatgactcctttctgagcacatgtccaggacaatgatggcttccccccgcctgctttaccctcacttacctggataccgtctgcttgtttctttccttacaaccatccagggctctttctcttgctctagtaacgtaattacatctggtttagaaatggaacttcctgcttaaaagaaacgacacatgtagaatttttttaatacagatttttttttttcaaatctttgtgacctgcttaaacttacaataaattacaagtcaaaacaatattgaaaagagacttcagataagagtgagaggttgagtaagagaactcttttctaactatgttagaaaaggacttcctttcatttaaactcagaatcttatcccttgaaaagaggtataactgaatggttgagagcaggaaacttcaatccagactgccaggttcaaatcctatctctgctactcactagcagtatgacctcaggtaagtcacttaaactctgtccttcagttttcccaactctaaaatggggatgatacaatacctattttataggattgatactaagacaaaataagttatatatatgcaaaatacttctaacattgcctgatgtacagtagcacaaagtcaagaattattgtttattattgtcatttattttgcatccttagacatttatagctcactcagtatattcactaaatgaaaatacataaactccatggtctgaaactttcaactgcaaaacaatggaatgtttattgaaggaaatgaaatgcattccctttagtgttaaatgaatttctgtcaacccaatcagtatacgtaaataacagacatttttgtttgtttgtttttggttttgagacagggtctcggtctattgcccaggctggagtgcagtgatgggtacagctcactgcagcctcaacctcccagtgatcatagaggtttctctgatagaaaaattcaagacactcttctccttacagatgggttagaaaaacaaaaacaaaccaacaaacagaaaatctacagtaattctgagatcaaacataatatgaaatctggttcttagacaatatctttcaatgaatgtacaagatttcaaattcagccccatggtcatgaagagagaggcaattacagagaggaccagcgtaacgaaggaggccattgtggagtaggcaagatgcaggggctccagggaggtgcctgttttcaacccaacaaatcccaatccattcctttgggaacaagaagaaggaattcagccacctcttaaaagatagccctgaaattcacggtgaagaaagctgatattccagaaaatagatataaaaatagctgggactcaacgaccttacccagtgagatcaggtggctgtagttctccaacatcacatccctgtacaaggtcctctgatcaggctgcaggcactcccactcctcctgagagaagtcaatggccacatccctgaatgtcactgatccctgaaaccacaaacacatgtataatggtgaaactgaagaaagttgttttaagatgaaaggagaggaagtgaaggagtgtagtgtaagaaaaaagcaatatggaaattcacagagtgcctgcacattcttcaagaagtctcctgctggctgagtatggtggcttatgcctatagtcccagcactttgggaggcagagataggaggattgcttgagcctagaaatttgagaccagcctgggcaacataatgatatcccatctctgcaaaaattaaataagtaactgtgtgtggtatcacgtacctgtagtcccagctactcgggaggctgaggtaggagtattgcttgagcccaggagttcaaggctatagtgaactgtgatcacgccactgcactccagcctgggccacagagcaagactctgtctcagagaaaaaaaaaaaaaaaaaaaaaggtggcatacaattaaagaatgttcttaatcctcaagttcattatggtatgagatgacagcaaaagtattttttcttgtcatgacaactgatttttataagctgcattaaagtcaatagaactcacatattagatttattcattttttttctatttatacgttgaggatggccagggcctctaaggatttccccaattctgagaattttttattttttattttttttctgagacagaatttcactctgttacccaggctggagtgcagtggcacgatcgcagctcactgcaacctccacctcccaggttcaagcgattctcctgcctcagcctcctgtgcagctgggattacaggtgcgcaccaccacaacaggctaatttttttttttctttttttagaagagatggggtttcaccatgttggccaggctggtctcaaactcctgacctcaagtgatccaccacccacctcggcctcccaaagtgctgggattgcacgcgtgagccaccatgtccagccagagaatctgtaatcacctatcattcatgccctgaattatcttctccctgctactgcccactgtcctcacctatcattttcctaaaagcctcataaagcagatcaccttgtcacacttgcagactgaggctactcactatggaattctaccttagctacctggaaagctctagtctgtaaagtttcaaagtgttcccaagtgtggtcaatcatctgtaacttatcaaacccataagaccctgtttccctgtggggactgattcctccactgttccaatattcttcctgaccaaggtctgagcacagagcacagactgaataactttttcaaagaaaacatcaaagccagtaggaaacagaggtacaaataggaagagcagtgactttttttttttttgtcaccaaccttcactgtaatgggacaaactggggtgtaagatcgtgaattctaggtacgaagcttcaggttaaataataacagtcacctaacctgaaagtcaccatatttcaaggaaaagagagaaatacaaacttacatggaccatgttgctagaattacaaaactggtcaatcttcctcgggcttctcccctggaaaacaacaacaacaaaaaggccacaattaaagctgtgtctcaaaagcaaataactattttatcctccgttcctatttctcaactactcctgctaacacgcacacttccacccttctcccatcactccccttgcccccacacacactctctcacaaatagctggcagtgaacgggtggagtagggatgaaaccaagctctcgcctgcatcccagggaacctgcggcagaagcatgaatgccgagcacaggcatttctgccttgaagttgtggcttccagccagtcctccattcttgggatacctatcttggcctaggtctggacctctgatcctgcccttagcagatcctcctcccccagtcccacctttcagagctgagaagggattgcatcatccaaaccagaacctctttgtgaaatcaggattgggtgcagtgggggaaggcatgagaactggaaagcatatttgcactggcagtgtttgcaccaaattgcactgacagtgttcagcattctaaattcagcaaaagccagttggttaatacagttcagaacatccacttaatagaatacaaagtaaatattaaacgttcaagatatatgattaacagaaaaatcaggttacaaaacaggatagataatatgattacatttgtaaaatatatgtatatagaaatactaataaaaagactaacagacattaatagaaaaaaatttagaaaattatatacatgttaagagttctcctctgtgtattgtagctccaattttcttctttttgcttaagagcatttcatggccgggcacggtggctcacacttgtaatcccagcactttgggaggctgaggcaggcagatcacgaggtcaggagatcgagaccaacctggccaacatggtgatacctcgtctctactaaaaatacaaaaattagctgggtgtggtggtgcatgcctataatcccagctactcaggaggctgaggcatgagaatcgcttgaacccaggaggcggaggttgcagtaagctgagatcgtgccactgcactccagcctggcaacagagcgagccttcatataaaaaaaaattgtaactacatccaagcattaacttggaatatatatagttatattcacacacacacacacgtgtgtgtatatatatatgtgtgtgtgtatatatatatttatatatatatatgtgtgtgtgtgtgtgtatgcatctctatatatggacatatataaatgtacatacacatttctttcctatgaggaaacttctccaaattagatgaaagacactttttatttagatatctccctttgaacttggggtgggaaatcagcatactctaatgaactgttgtttttacttaacaagtttgtttcctttattttccaattcttgaccaacactaagatgtctatgtttttctatgtatgttggagcaatctctagaaaaaattgtctacaagtccccaaccaatgtcttgtatgcattaatgatagtctatttctacttttgaagtaaaaaataaaaacagagttatcaggaaaaaaacctgagcctgtcacgagattcaacaaaagaggttaaagtgactacaacaaataacatcagctagttctaatatcctttagctgtatctcaccaatataattagatattctcattatcaagattcttctttgaatgaacacaatgcagataagtggcatttgcaaactatgtgagaaaatttgtgaaatatacaccaccatgcttggttcccttcttcaccaaataaccaattaaaatattattttagatataattcttatagaatgccttcagatagaattcttatagaattcttatacaaaaaccctatcttagtatatgggattcatataaaacataacaatttctttttggggggcaggggtggagtctcactctgtcacccaggctggagtgctgtggcctgatctcggctcactgcaacctcagcctcccaggttcaaacaattctcctgcctcagcctcctgagtagctgggattataggcgcctgccaccactcccggctagtttttatatttttagtagagacaaggtttcaccacgttggcaaggctggtctcaaactcctgacctcaaatgatctgcctgcctcagcctcctaaagtgctgggatttcaggtgtgagccaccgcgccccgccccatgtaacattttcttgagtattattgttcatagcatgaatattgcttaatgatatatcaaatatttttcttttcataattccttatagacatcattttattacctgtgtaatactctatcacttgagtctagtatgattagcttaatgatttctgtattataggacacttattttatacaagatcatttacaatgtcattccagatatcacaatcttttgattctggactacagtttttcaccctaggcactactgacatattgtgctggataattcttagatgggagagtggggagagctatcctgtgcataacacaatgtttagcagcattcctgacctctatccattagatctaagtagcaccctccccgacagcatgacaaccgaaagtttctaaacatcaccccagctgagaaccaatgttctatctagatcaatggatccaaacctcatgggtcacataaatttttttgataatcttatgaaatgatacactatttctccccctaaaacccacatttataaatttctataatacttcaatattttatttcaagagcttttggtccctgagaccataaatggagtcacaggaactcaggttaagaatttctgtcctacattccttacagaaacaggaaaaaaacaaaaatgctaaaatttgtatagaaccacaaaagacccaaatagccaaagcaatcttgagcaaaaggaacaaagttggactcatcaaaactatctgacttcaagatatactacaaagctatagtaaccaaaacaacaaggtactgacataaaaacagacacatagaccaaagaaacagaatagagaggcccagaataaatccatatatttataaccaaccgagttttgaggagggtaccaagaacatacaatggggaaaagagagactcttcaaaaaatactgttgtgaaaagtaggtatccatatgcagaaaaatgaaattagacccttatctcaaaccattatacaaacatcaactctaaacagattaaagacttaaatgtaagatcctaaactatgaaacaaatagaagaaaacatagggggaaagctctgtgaaactgatctgagcaatgattttttttgggatatgacctcaaaagcacaggtaacaaaagcaaaaatgaacgaatgaaattatgtcaagctaaaaagcttctgcacagaaaaggaaacaatcaacaaagtgaagagacatcttgtagaatgagagaaaatatttgcaaccatatatatgataagagattaagatccaaaatgtatgcagaagtcaaacaactcaacagcaaaaaaaaacctgattaaaagatgggcaaaggacctgaacaggcacatcccaaaagaagacatataaatggccaacagtttatgaaaaaatactcaacatcactaatcatcagggaaatgaaaattaaacccgcaataagatattagctcatacctgttagggtggctactggaaagacaaatgttaacaagtattggcaagaaaaggggaacgcttacacactgtgggtgagaatgtaaatgggcacagccattatggaaaacagtatggaggttcctcaaaaaattagaaatagaactaccatatgatccagccatcccactactgggaatatatctccaaaggaaatgaaatctgtatgtcaaagagatatcagcatacccatgtttattgcagcattattcacaatagccaagatatggcatcaacctacgcgtctaacaatgaataaatggataaagaaaatgtggtatatatgcaggtatatttacacaagggaatactatttagccataaaaagcaggaaattctgtcatttgcaaaaacatggatgaacctggagaacatcatattaagtgaagtaagccaagcacagaaagacatatgatctcactcttcagccaaatctaaaaaagttgatatcatagaagtggagagtagaatcgtatttacagatctggggtaatgtgggtgagggaggaaggagggcagtgttgactggggaaatgttggtcaaaggatacaaaatttcaggaagataagagaaataagttcaggagatctattacacaacagggtatctccaattaataacaatattctgtagtcttgaaaaatgctaggagggtggatattaagtgttctcaccacaaaaatgataactatgtgaggtaatgcattgttaattagctagatttagtcattccacaatgtatacataccataaaacttcatgttgcacatgataaatacatacaattatatctgtcgatttaaaaagaaagaatttctgtcctagatcatttgagcccctcactcattttcttaatatacaaccagcagtcgcaatgaatcacatattcccaatgctcctgttctgtagagagtcaaggggaatgacttaaaatgactacacaaaaaacaacagttaaaacatattaaacattattatatgcctagcactgctctaaggggctttacgatattaattcattctaatgacagaaccaatattccaacccagatactctggatccactcccctattcttaaccacaacagtgtactgcctctcacagtacacacacacacacacacacacacactcacacacacacgcctaaaacacaactggagctgccaaacctcagagagatctggcaagtattacaaatatcatctcatggactccctggaaaaatcctggctcttgttgataccaatttctgtgcggtcacttttccactaccgaatgcctcacaggcaatggagatcatccaaccatctccattcttccctgttttgaaaaggaggtctgtaaagaccaactgatgtctagtgtgtgattccacctaaacactaatctcctccttcccaaatatgggtctaaaatggagctttaatattaactactggaggtgtatttctataccagcttcgaaaaagagagcgcacaggaaggtgtgaacgatttgccaaattgttttgtgactattaagtggaaaggtgaaggagggggcacgaatcaatttgcatatccccctagtttcactgaaaatttaaggggaaatctcaatattctaaaatcaaaaacgcatgtcttgaacaaatacaaagcacaaactcacccttgactttaggtgtgcagcagtaacgctctcatcctcctccaggtccttcttttggataaaaatacgactggagaaggatacggcaagcgtgagactccaggcatttcttggagcgcagactaagtttgaaaacaccctccctccatagccacaatttccctcacttcacacgaaataggaaggaagtaaaaggaagaggaatcgattcaaccagtacaaccagtttggagctggtttctggggacagagctctgaggacgctgtggttctcaacatgtagctgcccccctggggaacactcgggggcacttctgcgctttcttgtgtaaagcttcattctcggctcaatatctgacctccctactggggccattcctctgctgcagtccccgcagctgtgaagcggaaagagggaggaagcagcaggagcctaggggcaccggcacagtgtcactcagcaaagtgcgctgcgtccacacgccctcccgggcctgtgcatagaacctcacgcacacactcacagtcccctccgtcactcatgatctcacaatccccctcctctgatacccgcgcacacacacgcctggggatccggcagatcccgtctgcacccccgggttcctactctgagcgcctccccctaggccacccgcactgtcgggtcagtcaggctggagccccaatccgcagagatctcccgcagccacagatctcttcctcagacgtgaagaccttaccccgctatgtcgtcgaccccggagaccggaagtggactggcgcggtggccgctgggaaatacagtcccgaacagaaaaagcctcagaagccttgagctgtgatccgttcaggttgatcccagcatactatgggggctgacccctaagggagccgagcctagtggattcgtgggagttccagcccgcggggtgcacaggttgttgccatgagcaaggatccccatgtgagaagagcgtttccctctcggagcgtcagtataatttactttttctctccatggagaatgcaaatgagcagaacttttaaagaagaaagaagaatttaaagtaaaattatgtcaacatgtaggtgctttaactcctttgtctcagaccccagcgataggcttccacttctctgtgctatttgaaggggacttaggataaatttgaaaagcttgaactaaagaattggttggttatatactaggagaggaagtgtggttcacattggagatttcagaatcaaatgtcctggattcttcgagacaatgttcctgttatctggagagaaaaacgtgattcaggacgacatggaaacggataaaaatacacagataattacttgccttatcttgaaggatgaataattaacactttgttaaaatagtataaacaaatgcaaaaaagggcttgcttttcctaggaagagcctgatttcactgttgtagtctaacaatatttaactttcaaaatcatttttctagtttcctatgctacataaggaggaaacatgtaataataaagagcaaaacgtcttttcattccagaattgtgacagaaaacaaataagatgattaactcaaccatatcaataatcacattaaatgtaaatggtctaaacaccttaatttaaaaagattgtcagattggattttttaaaaagtcagacccaaatgtgcatcaatgatagactggattaagaaaatgtggcacatatacaccatggaatactatgcagccataaaaaggatgagttcatgtcgtttgtagggacatggatgaagctggaaaccatcattctgagcaaactatcgcaaggacagaaaaccaaacaccaaatgttctcagtcataggtgagaattgaacaatgagaacacttggacacagggtggagaacatcacacaccggggcctatagtggggtcgggggagggggaagggatagcattagaagatatacctaatgtaaatgacgagttaatgggtgcagcacaccaacatggcacatgtatacatatgtaacaaacctgcactttgtgcacatgtaccctagaacttaaagtataataaaaaaagataattaaataaataaataaacaaaaagtcagacccaaatgggtgctacctacaggtaatatgttaaatgaaaagcactaaaaggttaagagtaaaaggatggaaaaatatacaccatcctaacactagtcaaaagaaagctggagtggctttattaaaaacaaagtagactccggacatagactattaccagagataaagaagggcataataatgataaaggagatagctcatcgagtagaaaaaaacaaacataaattttgctcctaaaagcaaagcttctaagtatgggaagaaaaatctattagatcgaaaaggagacagatccacaattatagtcagatatttcaatatatctctcttggtaattgatagaacaaacacagaaaagcaacagggtatagcagatttgagctacatatcaacttacttgatctcatttatatttgagaacactctcctcaatgacagtaaaattcatctatgtggacaggggatacttaccagtataggccatattctgggccataaaacaagtctcaataaatgtaagaggattcgagtcatacaaagcatattctttgacaaaaatggaattaaattagaactcaataatagctgaatatataatatattgtccaaagtagtacaaattcgaaaaggtatgaatactaaggtaattgaaattatgtaatgtttgaaaaattcctgtattaattataatattctgttatatcctaaagggtgaaacaataacatatatacgttaaagcaaaataacaattttgtagtaaggaaaaaaatttttaagctatttatgttgactaaacattagaataaagcggagaataattatatttaagtatattctgatactttaatcgatttcctaaccaatatcaccattctttttaagtattttctttcaatgtggtctattatttttaaattttgataaaattttatgcaatcttcaatgttggactttatgtttaataaactcaaaattatagctaccttcaaatgactcttctctgaacaccatactttttaaactgagatatatactctgtatatactaaggtaaccagaagtctcagaatatatccaatgaaatggaagatatcctcacaagtattgtgaatattgaatatggaaaaattagattgcagttcatattcttgtagttaatgtatcttgccttcaaggtacatctctttttttgccatctcttttttgtaccctaagaagggtacatttctttgataattatctttacaaggcaaacatattggttctatttatgattcctttgaatgttaagccaaatttagatgctgcagtaacataaggcttctcaactgcgctccattctgacacaaattgcaaattgatccagttaaaaattggagcatcatcaaaagactattcccatagctgaagaaattcctcagtaaaattgaagaatttcaaaattaaatcctgtatgccatctgatatttcatgacttaattcattcagtttctttcttaatttgtaggactaaatcccattgtcttcatgttggccagttctgataactgaaattcagttgaatttctatgttgaataggagtggtaagagaagacatctttgtcttgtgccaaatcaacacaatcttaaacaaccaaaggattaaagaatgaatacaaaaatttagaaaatattttagataaatacaaataaaaacacatgttaccaaagtttatgatatgcttattactaagagaaaaatttatagctctacatgcctatataaaagaagaaagatgtcaaatcaacaacctaactgtacaactttaggaattagaacatgaaaaatagcaaaacaataaataaatagaagacaagaaaggaaggaaataataaaaataagagtggagttaaatagagaatagaaaaataatacagaaaaattacaaaattaaaagtggttctttgaaaagatcaaaagaagtagcaaaatcttagctggattgactgagaaaaaaatagaaaagactcaaattactaaagtcagaggtgaaagtggagacattactaaccttacagaaatgaaaatgattatagaagaatattataaacaattgtatgccaacaaaataaactaaatggaaaggaacaattctttttttgcaatatttatttattattatacttttaagttctgggatacatgtgcagaatgtgcaggtttgttacataggtatacacgtgccatggtggtttgctgcacctatcaacctgtcatctacattaggtatttctcctaatgctatccctcctctagtcccccacccccgacaggccccagtgtgtgatgaggaacaattctttacacaaactgtcactgattcaagaagaaatagaaaatcttaagaggagtgatgtcagcaagattggagaatgggactttccagcacttagccctcacatcaatttaaacatctgtttactcatgaacaaactttcacaagagctaaagtatccaagtaagagattagagcaccttgctgtagcacagaaacaggaaaagatacattaaagaggctaagaaggagcgttttgcattacctagtccatcactctcccaagcccagcccagaaattatagtgtggtgagataccctccgtgttagaggatgaataaagtgaacaccaactttgctgtggaccctggcagcaggactactccactgaaacccaatgaccagctggcccccttgacccaaactccaaggtggcaccctcagctccaggcacaaagctggcacccacagatccaagctccaggataacccccatggatacaggctgtcagcctacccagcccctgtggctccagtctctaagctggctcccatggtcctacactctgacaaacccagggttcaaacccactccaccgcatccaatatccagacctggcccaggagaccccaagtgccaggccagctcctagagaccaaagctttagaaccacacctaaaaacacaggctccaggctggcctccatatccctaggacagcacccacagcctcaagcttcagactgacccctgtggaatccagacccaaatatgccccagaccagacccaagctccaggctggttcttgtgaccctatgctccagtggacccagggtccacgcctgcccaagcggatcctggaagcagggtgacccctatgagctcaagaccaaggcatattatgggcctatgtccagaccaccccagcaccaggtcaacctctgtggacccagacttcaggctggttcccatggacagtcctcaggcctatccatttgttgaccctggcaccagaccagcatgtctgataacttcagcagtaatcccacccacaaacttctctatacagcccacccaatatctctgatgaagggctttcactaccaaagctagtctgtaaagactagaagggatgcctacttcttcaaatgttcaacaccaaagcaagttcacaaagatcatgaataattaagaaaacatgacaccaacacaaatcaaaataaaccatcagtaaccaactctaaagaaatgaacatttacaaaatgcctggcaaagaattcaaaatgactgttttaaagaaactcagtgagcaaacaagagaatacagataaacactaaacaaaatcaggaaaatgatataggaacaaaattagaagttcaaaaaagagatagaaaacatagcaaatttttgcaaacaaaaattctggaactaaagaacacaataacagactgaaaaattccatagaatgcctgaagagcagacttaagcagaataaagaattaatgagcttgaagacaggtcatttaaaagttaaaagacaggccaggtgcagtggctcacacctgcaattccaaaactttgagaggccaatgtgggagaattgcttgaggccaggagttgagaccagcatgggcaacatagtgagaccttaattctacaaaacaaacaaaattttttaatttaaaaaaatttagctgggcatggtggtgcagagctgtagtcctaactactcaggaggctgaggcatgaggataactcgagcccaggagtttgaggctgcagtgagctatgttcatgtcagtgtaccctagcctgggtgacagtgagactctgtcccaaacaaaacaaaacaagctaaaaggattaaaaatgactataactacaacaatttgcctatgggtacatgatatatacaagatacaaattatactttggaaggccgagttgggcagatcacttgaggtcaagagttcaagacaagcctggccaacatggtaaaatcccttctctactaaaaatacaaaaattaattgggtgtggtggcatttgcctgtagtcccagctactcaggaggctaaggcaggagaatcacttgaaccctggagacagaggttgcagtgagctgagatcatgccactacactccagtctgggtgatagggtgagactctgtctcaaaaaaaataaaaaaggtacaaattatgacatcaataatgtaaaatatgaggagagaagaaagtgtagaatttttttttttttttgagacagagtctcgctctgatgcccaggctgcagtgcagtggtgcaatctcggctcactgcaagctctgcctcctgggttcatgccattctcctgcctcggcctcccaagtagcttgggaccacaggtgcccaccatcacacccggacaattttttatatttttagtagagacggggtttcactgcattagccaggatggtctcgatctcctgacctcgtgatctgcccgcctcggcctcccaaagtgctgggattacaggcgtgagccactgcaactggccaaagagtgtagaatttttgtatgcagttgaagttaaattgttatcagcttaaaataggctactacaattataagatgttttaggtaatccttatagtaactacaaagaaaaatacctacagtaaatacaaaaaaagacaaagagaaaggaatcaaagcatatcactacaaaatatcatcaaataacaaaggaaaacagcaagggagaaaaatagaacaaaggaactacaaaatagaaaacaattaacaaatggcagtagtaatgaataattactttaaatgcaaatggattaaatttgccaatcaaaacacatacagtggttgaatggataaaaaaaaacaagatccaataatattctgcctacaacagactcagttgtaaggacacacataggctgaaattgaagaattggaaaagatatttcatacaaatggtaaccagaagacaccagtggttgatgggtgcagtggtatattcctgtagtcccagctactcaggagtctgatgtgggaggattgcttgagctcaggagttcaaggtcagcctgggtaacatagcaacacccatgtctattaaaattttttaattaaaattgaaaaaaacagagaacaagggcagctatgcctatatgagactaaataaactttaagtcaaaaaactgtcacaagacataaagaaacattattgtatagttataaaggggtcaattcaataagaagatataataattataaatatatatgtgcccaacaatggagcacccaaatatatgaagcaaatgttaagagaactgaaaagagaaagagataacaatacaataatagtagaggacttcaatactctactttcaaccattgatagataaaacagacagaaaatcaataagaaaataggggactttaacaacagtagacaccaaattaggcataataaacatatatggaacatttcacctaacagcagcagaatacacattcttctcaagtgcacatggaacattctttggaataggtcacacgttaggtcacaaaacaagtctaaacaaattcaagaagattgaaatcatgtcaagtatcttttccgacgacaatgaaataaaactagaaataacagaaagaaatttggaaaatgtacaaatatgtggaaactcatacactactgaacaaccagtgggtcaaagaagaaatcaaaagggaaatcagaatatatattgagatggccaggcacggtggctcatgcctgtaatcccagcagtttgggaggccaaggtggctagatcacgtgaggccaggagtttgaaactagcctggccaacatggtgaaacctcatctctactaaaaatacaaaaatttgccgggcgtggtgttgcatgcctttagtcccaactacttgggaggctgaggcacgagaatcacttgaacccaggaggaggatgctgcagtgagccaagatcatgccactgcaccactacactccagcctaggtgacagagcaagatgctgtctcaaaaacaaacaaacaaaatatatatatacgtatatatatagaaagagagagagaggggtgggggaagggagagagaaatacaaacggaaacacagcataccagaagttattggatgcagcaaaagtgcttacaagagggaagtttatactataaatgcttacattttaaaaaaagaaaaaaatgtcaccaataaataacctaacaatgtacctcaaggcctacggagagaaaaacaaacaaacaaacaaaaaaaactggacctaaaattagcataaagaaggaaacattaaagatcagagcagaaataagtgaactcatgaccaaaaaagggttaataaaattaagagttggcttttctgtaagtcaaaattgacaaatctttagctagactaaggaaaaaaaagagagaaaactcaaaaaataaaatcacaaataaaagagtagacattacaagaaatgccacaaacaaaaggattagaagagacaactatgaacaattatatgcaaacaaactggctaacagaaaaaatagataaatttctagaaacatataatctgccacgaccgaataatgaagaaatagagcctgaatagactaataacaagtatggagatcaaatcaggaatcaaaaccctacaaagggaatcccaggaccagatggcctcacagctgaattccatgaaacatttaaaaaagaattaacatgaattattctcaaactcttccaaaaaattaaagataaaggaatgcttcaaaactcaccttataagtttagcactgccctaatacctgatactcccatcacaagcagctagtaaaagaacaaatcaagccaaagaatgtataaaaggaagtaccacatataaaagcagaagtcagtaaaatataaaacaaatatacaatagataatgcaatatcggaatttggttcttttaaaatatatatataatttaaaaacctctagcaaaatgtatgagagagagaggagtgtaagagggagagaggaaaaggaaggcaggaagaaagggagggagagagggagggatagaaggaattactaatatcagaaatgataaatgaggtctgaatacagactctgtagacattataagccctcagaaataatgccgcatatctacaaccatctgatctttgacaaacctgacaaaaacaagcaatggggaaaggattccctatttaataaatggtgctgggaaaactggctagccatatgtagaaagctgaaactggatcccttccttacaccttatacaaaaattaattcaagatggattaaagacttaaatgttagacctaaaaccataaaaaccctagaagaaaacctaggcaatactattcaggacataagcatgggcaaggacttcatgtctaaaacaccaaaagcaatggcaacaaaagccaaaattgacaaatgggatctaattaaactaaagagcttctgcacagcaaaagaaactaccatcagagtgaacaggcagcctacaaaatgggagaaaattttcgcaacctactcatctgacaaagggctaatatccagaatctacaatgaactcaaacaaatttacaagaaaaaaacaaacaaccccatcaaaaagtgggcaaaggatatgaacagacacttctcaaaagaagacatttatgcagccaaaaaacacatgaaaaaatgctcatcatcattggccatcagagaaatgcaaatcaaaaccacagtgagataccatcccacaccagttagaatggcgatcattaaaaagtcaggaaacaacaggtgctggagaggatgtggagaaataggaacacttttacactgttggtgggactgtaaactagttcaaccattgtggaagtcagtgtggcgattcctcagggatctagaactagaaataccatttgatccagccatcccattactgggtatatacccaaaggattatacatcatgctgctataaagacacatgcacatgtatgtttattgcggcactattcacaatagcaaggacttggaaccaacccaaatgtccaacaacgatagactggattaagaaaatgtggcacatatacaccatggaatactatgcagccataaaaaatgatgagttcatgtcctttgtagggacatggatgaaactggaaaccatcattctcagcaaactatcacaaggacaaaaaaccaaacaccgcatgttctgactcataggtgggaattgaataatgagaacacatggacacaggaaggggaacatcacacattggggactgttgtggggtggggggaggggggagggatagcattaggagatatacctaatgctaaatgacgagttaatgggtgcagcacaccaacatggcacacgtatacatacgtaacaaacctgcacattgtgcgcatgtaccctaaaacttaaagtataataataataaaattttaaaaaaagagaattaaggtaaaacaataaaaactttttgacatttgacaatttagttaaatgtccaattttcttgaggaataaaacttgtacaaattgacataagaagaaatagaaattctgaattatccttaatctatttaaaaaaaaggactagtatttttttaattctcccaaaagaaaattccaagtctaaatcgcttcactaatgaatccttctaaacatttaagaaatatcatcagccttagacaaactcatccagagaatagaaaaaaatggaaacatttcccaactcattctaaaagtccagtcattctgatattaaaacctgacaaggatacttcaatttgtatcttataaacataagtacaaaaatctttaccaaaataatagcaaatcaagaaaaatataagaagtataatatatcacaaccaagtagggtttatttaagaaatgcaagggtagcgtaacattgaaaatcaatcagtataattctagtatattaacagaaaatacaatcgtcttggtagactcagaaaaaccacttgatagaagtcagtacttaaaacacagcaaactaagaacaaaaaaagcttccctatttttataaatatcatctaatatgatttgctaaagaactttaaaaagcactttagcaaatcataagatttttaaaaatgatttaaaagttcattttaatcataagatttacaaagaactttagcaaatcataattaatgatgaattattataattaatagtgaaaaattgaaagctcttcttctgagatcagaattaagcaaggatacccattctcaccactttatttgaggctccattcaatgcattaaagcaaaacatatgaataaaaggcgtatcaatggaatgaaaatagacaacctgttgttcctcacagatgacatcatggcaaaaatagaaaataaaaatgaatctacagcaatgtattatataatttagcaatgtcactggatttaaatataaagtacaaatacaaaaaagaaatattatttctatgtaatttctaaatactaccaacaaagaaatataaaatgaaaattttaaagtggtgccatttaaaatatcaagtatctagaaaaaaatctaataaatggtgtagaaaacttctacactagcctagcccagtggctcatgcctgtaaccctagaactttgagaggctgaggagggaggcttgcttgagggcaggaattcaagaccagcttgggtaacatagtgagacccatgtctctacaaaaaatatttagctgggcatgatggtgtgcccctgtagtcccagctactcaggaggctaaattgggaggatcacttgggcccaggaggtcaggctgcagtgaaccatcatcacgcctctgtactccagcctaggtgacagagtgtgaccctgtctcaaaaaaaagactttgggagcctgaggtgggaggatcacttgagcccagattctagaccagcctcagcaacatggtcaaaccccaaaaatgttataaaaattagccaggcatgatggcacacacctgtagcctgggagatcgagattgcagtgagccgtgccactgcactctagcctgggcagcacagcaagaccttgtctcaaaacaaaaacaaaacacaaattgttcctggaaaaaaattaaataagacctaaatcagcaagggatacactgtttatagattgaaatactcaatttggctggatgctgtggctcacacctgtaatcccagcgctttgggaggctaaggtgggcggatcacctgaggtcaagagttcaagaccaacctggccaacatgatgaaaccatgtctctactaaaaatacaaaagttagatgggcatggtggcagccacttgtaatcccagctactcaggaggctgaggaatcgcttgaacccaagaggtggaggttgcagtgagctgagattgtgccactgcactccagcctgggcaaataaaaaaaaaaaaaagattgaaatactcaatttttaaaaaatatcaatccttccaaatagatatatacattaaatgcaaccccagtgaaaattccagcaggattgtttgtgaaaatgtataggctgattccaaaatggaaatggaaagatcagagatgaagaaaagttcattgaagagaaactgaagaaaagaacagagctggagggcttatttaaaagcctttataattaagataatgtagcaatggcacagagttagacaaatagaccaatgggaaagagtagagattacaaaactgaagtaaagacaaaactgtattctcaaaaaagttgtgcctaagtgtcccaaagacatacacaaaaacagtgctgttatgacagtggaaaaatacagtgatatgaaaataaaaactggctgggcatggtggctcatgcatgtaatcccagcactttggaagactgaggcgggcagatcatctaaggttaggaattcgagatcagcctggccaacatagcgaaaccccatctctactaaaagtaccaaaattagctgggcgtgatggcgaatgcctgtagtcccagttactcgggagtctgagacaggagaatcacttgaacctgggaggcagaggttgaagtgagccgagattgcactactgcactccaggctgggcaaaagagcaaagctctgtctcaaaataaataaataaataaataaataaataaataaataaataaataaaaagaaagaaactaaaaatttcaactacatgcaatagtatgtatgagtttcaggacataatgttgagccatagaagtcaggcacaatgagtatatgtactgtgtgattccatttatacaaagctcaaacacaatgaaactaatctacagttttagagatttggatagtggtaacctttgggattagtgactttattatggcatgaaagtagaccctgggatgttggtattactctgtttcttaatctggattttgttttcaggagagtattcaaattatgaaaatgtgaaggtctgtacacttacgatttgaactctctcctttgtgaatgttgcactgaaataaaatgtatgggaaaaaagacataaggttaggtaaataatagcctggaactttcataaatctttttttttttttatcttttgaaaaaagatgttacactgtcactcaggctggagtgcagtggcactatcatggctcactgcagcctcaacctcatgggcaataacaagtgtgatgtcagtctgaggtcggacaggcagttgttgggcagatgtccttgcagaagtattcttttgtgtaagattacaacggcctttgtgcaaggttttggttttgttttgttttgtttagacacaactcaagtgatcctcatgcctcacctcccaaatacctgggactgtagatgcacgacatcttgcccagctcgattgtgagttttgcaaagtcttttctgttatcaggcatacaagctgagaatcccctcttcatagccctcttcatccaactctatttgtcaggatttgtttaacattagtgattccattttgattctggaaactttcacatttccctctttcattcaagatctttctccaaaaacatcactgatcaatcatcctgtagttaaatttttatgtcccttaatgctgacatgaacctgttgcagttgctggtcttgacccacattgagggaagtgattggtgactaggaatcagtgtgaaaaccctttgagccacatttaaacaacaagggagatttcaaaggagtggctgttatgccaagtctacgtggaatccattactaaattctattttgtctgttctgtagttttttggtaatcatctgaaagtgcttggctagcattattttattaggagttgtattctgcaaaattaacaagtaacaaatacaaagtttttaaaagggacaaaaacaaagtaaaactaactgcagtatgacaatcccagtttgcataatggtcttgagacatgaacctaggcttaaagacaactaattgaatatatcaagtgaccatagaaaattagatgagacctattgtaaccatgtggcctgttttcttattttgtgtatatgcgtctcaactttcccagaggaatctatccaggtacagcatgtaatagtattagcaatagtacagaccttttcttatttaaccaatagatgctaaaggatttcttaggttaagatttctgccaggcgcggtggctcacgcctgtaatcccagcactttgggaggccgaggcgggcggatcacgaggtcaggagatcgagaccacggggaaaccccgtctctactaaaaatacaaaaaattagccgggcgcagtggtgggcacctgtagtcccagctactcgggaggctgaggcaggagaatggcgtgaacccggaaggcggagcttgcagtgagcggagatcgcgccacagcactcccgcctgggcgacagaacgagactccgtctcaaaaaaaaaaaaaaaaaaaaaagatttcttaagttaccagcagaagctgttgaacgtaaaatttcatttacaccataacatggtttggctctgtgtccccacccaaatctcatgtcaaattgtaattcccagtgttggaggaagggcctggtgggaggtggcggacttccccctgtcccccttgctgttctcgtgaaaaatgtgtagcacctccccacctacgccctctctctctctctctccagccatgtgaagatgtgcctgcttccccttcaccttccaccatgattgtaagtttccggaggcctccccagaaacagaagcctgtacagcccacagaaccatgagctgattaaacctcttctttataaattacccagtctcaggtatgtctttatagcagtgtgagtgtggactaattacaccattatcctgataagtgaaaacggtaacattaaggggagccttggggaaagctgtttacaacataacaacatcaacttctcctcctgactggtagtttgaatgtctgggcatgacattgggtggtttggtgaactttttgtatggtccatacatcaggcatgaggcttgttcctgaaaattcatctagtttcagcttatagggctttaggaatagagcagattttgttttcagttggagagttgtagccaaatattgaaaaaaattaggagaattcatgaatgggtctagtctataggtagatgacaaaaacttgaaactaatgcacagggctacagtctaatctaataatgggtgtattatagtttttctttgaaacaaagtttttccctctacattgataatataaaaatctcagatttggcagggcatggtggctgatgcctgtaatctcagcactttgggagaccaaggtgagtggatcactggaggtcaggaattccagaccagcctggccaacatggtgaaaccctgtctctactaaaatacaaaaaattagctgggcatggtggcacacacctgtaatctcagctacttgggaggctgaggcaggagaatcacttgaacccaggaagtggaagcagaaaaaacatctcagatttaaaaaccttttgagattaggaagccaaacctaggcagatgttagattttactaagaatcttaaggttgttgggcctgccaggaagtgaccatttttaatcactcattgtaagactgggaactcctgaagctaggcatctagtgtacattcttaaatgtggcatttcagtcaaaaaccttggtaatagagccaatgtttcaaattgcaatctggttataaagaaagcaggtctttattaaacttatgtaaatgaaaacaagaatactcacaagtggtttctgaattttggagaaatcaagtagagagaaaaagcaaatgcttccatgtttgttgacaaaagtacaatatacttatttacaaattgttgtaaactataccttatgaaataaaatgtccttaaatctgggaaacaaaacatttaagtaaaggatgttttaaataaaagttataaaacattatctttatcagttacttaattttatgtaattaattttttgttgttcttgatcccaattaatagtttttttttttttttttttttttttttttaatttatttttttattgataattcttgggtgtttctcacagagggggatttggcagggtcatgggacaatagtggagggaaggtcagcagataaacaagtgaacaaaggtctctggttttcctaggcagaggaccctgcggccttccgcagtgtttgtgtccctgattacttgagattagggattggtgatgactcttaacgagcatgctgccttcaagcatctgtttaacaaagcacatcttgcaccgcccttaatccatttaaccctgagtggacacagcacatgtttcagagagcacagggttgggggtaaggtcacagatcaacaggatcccaagacagaggaatttttcttagtgcagaacaaaatgaaaagtctcccatgtctacttctttctacacagacacggcaaccatccgatttctcaatcttttccccgcctttcccgcctttctattccacaaggccgccattgtcatcctggcccgttctcaatgagctgttgggcacacctcccagacggggtggtggctgggcagaggcgcccctcacctcccggacggggcggctggccgggcggggggggctgaccccccccacctccctcctggacggggcggctggccgggcggggggctgacacccccacctccctcccggacggggcggctggccgggcagaggggctcctcacttcccagtaggggtggccgggcagaggcgcccctcacctcccggacggggccactggccgggcaggggggctgaccccccccacctccctcccggacggggcggctggccgggcggggggctgacccccccacctccctcccggacgaggcggctggctgggcgtggggctgacacccccacctccctcccagacagggcggctggccgggcggggggctgacccccccacctccctcccggatggggcggctggtcgggcggggggccgacccccccacctccctcccggacggggcggctggccgggcagaggagctcctcacttcccagtaggggcggccgggcagaggcgcccctcacctcccagacggggcggctggccgggcggagggctgacccccccacctccctcccggacagggcggctggccgggcggggggctgacccccccacctccctcccggacggggcggctggccgggcagaggggctcctcacttcccagtaggggcggccgggcagaggcgcccctcacctcccagacggggcggctggccgggcggagggctgacccccccacctccctcccggacggggcggctggccaggcggggggctgacccccccacctccctcccggacggggcggctggccgggtgggggggctgacccccccatctccctcccggacggggtggctggccgggctgaggggctcctcacttcccagtaggggcggccgggcagaggcgcccctcacctcccggacggggcggctggccgggcggggggctgacccccccacctccctcccggatggcacagctggccgggcgggggggctgaccccccacctccctcccggatggggtggctggccgggtggggggctgacccccccccacctccctcccggacggggtggctgctgggcggagatgctcctcacttcccagatggggtggctgccgggcggagaggctcctcacttctcagacggggcagctgccgggcggaggggctcctcacttctcagacggggtggttgccaggcagagggtctcctcacttctcagacggggcggccgggcagagacgctcctcacctcccagacggggtctcggccgggcagaggcgctcctcacatcccagatggggcggcggggcagaggcgctccccacatctcagactatgggcggccgggcagagacgctcctcacttcctagatgtgatggcggctgggaagaggtgctcctcacttcctagatgggatggcggccgggcggagacgctcctcactttccagactgggcagccaggcagaggggctcctcacatcccagacgatgggcggccaggcagagacactcctcacttcccagacggggtggcggccgggcagaggctgcaatctcggcactttgggaggccaaggcaggcggctgggaggtgtaggttgtagtgagccgagatcacgccactgcactccagcatgggcaccattgagcactgagtgaacgagactccgtctgcaatcccggcacctcgggaggccgaggttggcggatcactcgcggttaggggctggagaccggcccggccaacacagcgaaaccctgtctccaccaaaaccagtcaggcgtggcggcgcgtgcctgcaatcgcaggcactcggcagactgaggcaggagaatcaggcagggaggatgcagtgagccgagatggcagcagtacagtccagcttcggctccgcatgagagggagaccgtggggagagggagagcgagagggagacggagagcgagagggagacggagagcgagagggagacggagagggagagggagagggagagggagagggagagggagagggagagggagagggagagggagacagagggagagggagagggagagggagagggaccaattaatagttttatgagtccatcagtttctttattagagttcttgaaatttttatttaatccattgatcttaaagctgtcagaaatctgtgttcaagcctggtgcagtggctcacacctgtaatcccagtactttgggaagccacagcaggagaataacttgaggccaggagttcaagtctagcctagacaacatagtgagacccccctctctacaaaaaaataaaaataataaaaccagccaaccacagctgtggacacctatagtcccagccactcgggagtctgagatgggtagattacttgatcacaggagttcatagctgtagtaagctattatcatggcactgcactcaaattgggtgacagagtgagaccctgtcaccaaaaaaaaaaaaagtctgttcaagggtacgtgttagagttgctttcttgaaaagcaattttgaaccatggctgattataaatgtttttagagaagaattcaaaacaattactgtaagtaacaaaaacttagactagccataaaggctcccaatttatcaaaacagaatcacacatcactgtaaaatcatggttattcatttaaccagagtgataatcaaaaggcttcaaaaacaatacagaaaatttcatggatatgaaaactttaaccctttcaaagctcagtttttctaagtaatcaaaaacctaataaagacaacgtaggaattgtcttgataaaatgtaaaatctttggggttttgtttaagaccagttacaaaaagctaaattaaaaacttcttgtattctaattgtttttccttatgggaagcatgtttaggcaagctggaagtcaaatctaatgaaaagggtacttgaattttatcagacacaggaagagtttgtccaaggctatgagtaaacactatattatagaggaatgtaaataagaaaactagtaccttgagcaggggggaaaacatagctcttagtaacagcatgggaagtttcccggttacacgaagcaattcagacacatcaagaaaagccaagagtacagaatcaagttatactggaagaaaacattgcttttcttgacctgcaagataaacatttcagcattgggccataacagtaggattaaaaccgggggtggggggtgagggaagttacagcaatttaaaaaaaaaggttgaatgagaaagttatcacctcagccaagcaaaaatgatataccatttcaaggggagaaagaacagaaggcaatgatgtatgaccatcacatcacatgcagtgagatacagcgaaggatgaacttctcataaataaatctgagaagttccaaaaagaaaacaatttaccttgagaataaaatcacattctgaatgaaaaagatagcatttcgaacctgaaattagggaggttaattatatctcaggaagaaatagaaataatatagaaagatggttgttaaacagatttcagaattaaaaaccagaacctcttgtaattttatatagagcaaatcaatactttaagaaaaacttattctaacatagaggactaaatttttttagttttgcattagtgcttttttttctttttttctttcttttttttttgttttttttttttgtttagacagagtcttgctctgtcatccaagctagagtgcagtggtgccatctcagctcactgcaacctccacctcctgggttcaagcaattttcccgcctcagcctcttgagtagctgggactacaggcacccactaccatgcccagctaatttttgtatttttactagagggagggtttcgcaatgttggctaggctggtctcgaactcctgacctcaagtgatcctcccaaagtgctgggattacaggcatgagccaccatgcccagccagcatttttaatatctgtattagtccatttccacactgctataaagaactacttgagactgggtaatttatttttttttaaaaaaaaggttcaattgacttacagttctgcatagccagggaggtgtcaggaaacttacaatcatggcagaaggtgaaggggaagcaaggcacgtcttgcatggctgcaggagagagagataaagaaagtgccacacttttaaaccatcagattgtgtgagaactcactcactatcatgagaacagcgtggggtaaacccacccccatgaaccaggtccctccacaacacatggggataacaattcaagatgagatttgggtggggacacagaaccaaactgtatcaatatcaaacttcagtctttagaaagactaaattacagccaagttgatcccacacaaaattctttttttttttctattgagacacagtctcactctgttgcccaggctggagtgcagtggtgtgctcttggctcactgaaacctctgtctcctgggttccagcgattctcctcaatcaggcccctgagtagctggaattacaggcattcaccaccacaatcagctaatttttgtatttttttagtagagacagggtttcgtcatgttggccaggctgatctcgaactcctgacctcaggtgatccacctgccttggcctcccaaagtgctgggattataggtgtgagccaccatgcccagccaaataaattttcttttcatgaactttatcacaatttatttagactattgacaacatgcttggactttctactttgtcctatacttcctttttcttaaataaccagtcattttactttaggacaaaaatttaccatgaaaagattctttctcatacaaaattattcttctattttttaacctcccttacgaaaaatacatcttcatattcctaccttttctcacattcctctctcctacttattggttcctttctatcttgtttgatctgagagcctaagctttaaaaacatttatctattcctttttcttttagattactaatttttcaaataagtgttttatcatcatacacaattgttagtcagacaactccaaatttatttatttatttatttttgatacagagtctcactctgtcacccaggcttgagtgcagtgatgcaatctctgctcactgcaatctctgccttccgagttcaagtgaatctcatgcctcagcttcccaagtacctgggattacaggcatgggccaccacactggctaatttttgtatttttggtagagacaggttttgccatgttggccaggctggtctcaaactcctggcctcaagcaatctgcccaccttggcctcccaaagtgctaagattacaggcatgagccatcacacccagcctaaatttgtatttctaaaaggtgtctcggttgttggttaccacggagttgtaattttaaagctattaattcaaaagccctttaaaacttcttcttttaaaaatcttgattggaatgccataagcagtgagttttatctcaacaccagcagaaaggtcagcagattccaagtaggcagagaaaaaattagagagatagcttagaagactctacatgttaactctatagttgcagatttttttttaacaatgaccatctaagctctgaattttccttgctgtaatttgcccatcaatgtaaaaatgtgcacaagaacaggccataatatgtgccaactatagtgggtcccagaaaatctggcatgccttattcatgtttgagaatgccattttgtttctttctttctttttttttttatactttaagttttagggtacatgtacacattgtgcaggttagttacatatgtatacatgtgccatgctggtgcgctgcacccactaactcatcatctagcattaggtatatctcccaatgctatccctcccccctccccccaccccaccacagtccccagagtgtgatattccccatcctgtgtccatgtgccatctcattgttcaattcccacctatgagtgagaatatgcggtgtttggttttttgttcttccgataggttactgagaatgatgatttccaatttcatccatgtccctacaaaggacatgaactcatcattttttatggctgcatagtattccatggtgtatatgtgccacattttcttaatccagtctatcattgttggacatttgggttggttccaagtctttgctattgtgaataatgccacaataaacatacgtgtgcatgtgtctttatagcagcatgatttatagtcatttgggtatatacccagtaatgggatggctgggtcaaatggtatttctagttctagatccctgaggaatcgccacactgacttccacgatggttgaactagtttacagtcccaccaacagtgtaaaagtgttcctatttctccacatcctctccagcacctgttgtttccggactttttaatgatcgccattctaactggtgtgagatggtatctcattgtggttttgatttgcatttctctgatggccaatgatgatgagcattttttcatgtgttttttggctgtacaaatgtcttcttttgagaagtgtctgttcatgtccttcgcccattttttgatggggttgtttgtttttttcttgtaaatttgtttgagttcattgtagattctggatattagccctttgtcagatgagtaggttgcgaaaattttctcccattttgtaggctgcctgttcactctgatggtagtttcttttgctgtgcagaagctctttagtttaattagatcccatttgtcaattttggcttttgttgccattgcttttggtgttttggacatgaagtccttgcccatgcctcggtgctctacacgttcagagaaacttctctagtaacaaactatagaaatgatccctgaaagtatagtcttgagaatgccattttgtttcttattcatctcctgggagcaaagaaaatcttctaagtcctgtaagggaattcagaagttttttaaaaattattatttttttattttattatttttttgatatgtagtcttgctctgttgcccaggctggagtgcaacagcgccatgttggctcactgcaacctccacctcctggattcaagtgattctccagcctcagcctcccgagtggttgggattacaggcttgcgccaccatgcccagctaatttttgtgtttttagtagagacggggtttcaccatgttgcccaggctagtccgaactcctgacctcaggtgatccacccacctcggcttcctagtgctggaatgataggcctgagccaccgcacccggacaaattcaggagtttagaccagtgttttagatggtggtgtctgccctggtagctgtaaagtagccctcgtgcatccatcatttagaatatttacttttgctcctgtaagattttcagaaacaagcaaggaaaaagagtcaaaccaaatagaaggaaaccaagataagaatgttccaaatattttaacccaggtgtgcagatcaaacaaaatattaaaccagagaaggtgcacagaccagagaagatgtacctcgcagacaggatgtaaatactttagaaacctagagtattcaatgcagaaagatacttgtctctatacccggaaggacttaccagaaaagacaaaaagtcttatttcaggagggatgtatggtctttcataaaaatgaccttatccaaacaagaccccaaataaagtcaaaaagcctccaacagaaggagggaggatcacttgtaatttgcccatcaccagggcagaaaaggtgagccagggaagtgactcagtaaatactgctcactggttccaagtatcaccatttccttctttttgttttggttgtttttgttgttgttgtttctttttattgagactgagtctcattctgtcacccaggctggagtgcagctacgtgatctcgcctcactgcaatgtccgcctcccgggttcaagcgattctccggcctccacctctcgagtagctgggattacaggtgctcgccaccacacccggctaatttttgtatttttagtatagacggggtttcaccatgttggccaggctggtctggacctcccaacctcaggtgatctgcccgcctcagcctcccagagtgctgggattacaggtgtgagacactatgcctggtcaccatttcttctgctagtgaactttttcaggtcctgtttcaaacaccatatatgtcaacctatttaacaaacagaaagagtctctctgaaagaaaagatatttgtttagcaatagagcattgcaatgggaatctgtataccatagtgaaatatgtgcaaattcagggagataaaggaagacaagggtttttaaatgaaaaaatgaggaggattacataattgttttgaaataattatccttggctacaaagatcaataacaagtctgagactggacagggaattgttgagcagatgtccttgcagaagtattatttgtataaggttatggtggactttgtgcaaagttgtggtttttgtagtcttttgtgacagtttttgtgatcaggcatacaagcatgaaaaccttctcttcatgttctccccatgcttgatttgtcagagttttcatttttcttcttttgggacaggatctcactctgccacccaggttggagtacagtggtgtgatcatggctcactgcggcctcaaactcctgggctcaagcaatcctcctgcctcagcttcccaagtagctgaaactgcaggcacctgccaccacacccagctattttttttatgttttgtagagatgggggggtctcactatgttgcccaggctgatcttgaactcctggtctcaagcaatcctcccacctcggcctcccaaagtgctggaattacaagtgtgagccactattcctggcccatgatatgtcagttttcttaacattagtgactccgtttcgattctgacaactttcacagttctcttactaatatatgttgttgacagccttctcaaagcaaaccttccatctgagctttacccatacatatgtgtatatgatacatgactagccacatgtatgatgcaggtgccttaaagacagagcaaactacatgtgctaaatagagtgtgctcttacctttacacccaaaccacagcctcttcagtttgtcagtgtcaataaacaccaccatgaccaatccagttgctcatgtgagagacttgtgagtcattacccatactaacctttctcaaacaaccctttatgagggcaaagtggctgatgcctgtaatcccaacactttgggaggctgaggcaggaggactgtttgaggccaagagttggagaccagcctgggcaacatagctagaccccatctctaaaaaaaaaaacagccctctccctctgtctccctctccccacggtctccctctcatgcggagccgaagctggactgtactgctgccatctcggctcactgcaacctccctgcctgattctcctgcctcagcctgcccagtgcctgccattgcaggcacgcgccgccacgcctgactggttttggtggagacggggtttcgctgtgttggccgggcaggtctccagcccctaaccgcgagtgatcccgccaacctcagcctcccgaggtgccgggattgcagacggagtctcgttcactcagtgctcaatggtgcccaggctggagtgcagtggcgtgatctcggctcactacaacctacacctcccagccgcctgccttggcctcccaaagtgccgagattgcagcctctgcccggccgccaccccgtctgggaagtgaggagcgtctctgcctggccgcccatcgtctgggatgtgaggagcccctctgcctggctgcccagtctggaaagtgaggagcgtctccgcccggccgccatcccatctaggaagtgaggagcgcctcttcccagccgccatcacatctaggaagtgaggagcgtctctgcctggccgcccatcgtctgagatgtggggagcgcctctgccccgccgccccatctgggatgtgaggagtgcctttgcccggccgagaccccgtctgggaggtgaggagcgtctctgcccggccgccccgtctgagaagtgaggagaccctctgcctggcaaccaccccgtctgagaagtgaggagcccctccgcccggcagccgccccgtctgagaagtgaggagcctctccgcccggcagccaccccatctgggaagtgaggagcatctccgcccggcagccaccccgtccgggagggaggtggggggggtcaaccccccgcccggccagccgccccatctgggagggaggtggggggtcagcccccccgaccggccagccgtgccatccgggagggaggtgggggggtcagccccccacctggccagccgtgccgtccgggagggaggtgggggggtcagccccccgcccggccagccgccccgtccgggaggtgaggggtgcctctgcccggccacccctactgggaagtgaggagcccctcagcccggccagccaccccgtccgggagggagatgggggggtcagcccccccacccggccagccgccccgtccgggagggaggtgggggggtaagccccccgcctggccagccgccccgtccgggagggaggtgggggggtcagccctccgcccggccagccgccccgtccgggaggtgaggggcgcctctgcccagccgcccctactgggaagtgaggagcccctctgcccggccagccgccccgtccgggagggaggtgggggtgtcagccccccgcccggccagccgccccgtccgggagggaggtggggggggtcagcccccccgcccggccagccgccccgtccgggaggtgaggggcgcctctgcccggccgcccctactgggaagtgaggagcccctctgcccggccagccgccccgtctgggagggaggtgggggtgtcggccccccgcccggccagccgccccctccgggagggaggtggggggggtcagcccccccgcccggccagccgccccgtccgggaggtgtgcccaacagctcattgagaacgggccaggatgacaatggcggctttgtggaatagaaaggcaggaaaggtggggaaaagattgagaaatcggatggttgccgtgtctgtgtagaaagaagtagacatgggagacttttcattttgttctgcactaagaaaaattcctctgccttgggatcctgttgatctgtgaccttacccccaaccctgtgctctctgaaacatgtgctgtgtccactcagggttaaatggattaagggcggtgcaagatgtgctttgttaaacagatgcttgaaggcagcgtgctcgttaagagtcatcaccaatccctaatctcaagtaatcagggacacaaacactgcggaaggccgcagggtcctctgcctaggaaaaccagagacctttgttcacttgtttatctgctgaccttccctccactattgtcccatgaccctgccaaatccccctctgtgagaaacacccaagaattatcaataaaaaaataaatttaaaaaaaaaaaaaaaaaacaaaaaaaaaacataaaaattagccaggtgtggtggtacaccactgtaatcccagctacgcaggaggccaagtgggaggatcacttgagcccaggagttcaaggccacagtgagccatgatcacacaactacattccagcctgtgtgacagcatgagaccctatctctaaaaattttttttaaagtacaaaagaaaaaaagacctttacgaaacacttgctatgtttactgcatacttctttcccaaggaattattgtgcaagtacaacgctctccttcatgctgattttcatcatctgtatcagagccatcatcccgtctcacctagtttacttcaaacatcttcaaaagatcaaaacatcaacagttgttttgaagatgtttgaagtaaactaggcgagaggggatgatggctctgacacagatgttttttcccatgtttacgcttactcaattcaataaactatgctcataattgttaggtaaactagacaattttttaaatgtctcctgtctctttgataaagtccttaaattacccaaaattactgttgggtacaaattcctaacctaatcgataaaacatggcagatggtcacggcatcctaactcagtaacctcagctcctgctcaattctcttgttgttggaacacaaggcatagcacacagaatttcctttcattctttgcatgtcctttgttcctttctgcaaatgttgttcaaacaatggtttccatttgcctaaagtgcctgctatggctggttaacctctaaaatatttagggagcagcccaacctgcagatacaaagatgtcaaaaaacgaaattacaacacatttactttaaagaccttaatttattttatttgtgattctagaatcaagcagcactttattctacaaaatagaatgagtagaggagctgagcagagcagggtggttttacagacagaaaagggctgaggaaaacagacacagagagcagaaagtgccttggccatttcaaagttacttcccctgtaaaggttaaagcagagggggtttcaatatcatgccagctaaaactggtcaggccgggtgcagtggctcatgcctgtaatcccagcactttgggaggctgaggtgggcagatcacctgaggacaagagtttgagaccagcctggccaatatggtgaaatcccgtctctaccaaaaatacaaaaattagtcgtgggtggtggcgcatgtctgtaatcccagctattcgggaggctgaagcatgagaatcgcttgaacctgggatagagaggttgcagtgagccaagatcacaccattgccctccagcctgggcaacagagtgagactctgacttaaaaataaaataaaatgaaatgaaatgaaataatgaaatgaaatgaaatgaaatgaaatgaaatgaaatgaaataaactggcctgcttggagatttggctatcatctccctctctctctctctctctctctctctctctctctctctctctctctcgaattattggaagatcagataaataacctagtttcagcttggtggcatggaacttcagcaggagtaactccatttttgtttggtctgttgagcctcatgcaggggctcagcccaaaccaatggctaaaccattggctaaactgtaaagtttatttaacaaaggggagctttccatggtcctgaaacaaactaccctgagctcctcattgcagcaacctatgcaactacaactatcattggttctgtaattgtttctttgatgtctggattcccccacagactttaaggaagtagatacctttctgtttactactgaataggagtgacacagggaaggtacttcttcacagtatgagatgagtggatgaatgactagagtataaaacgctgtcagcaactgggtaggctctacaacttcctcagcaggaggaccagaggctggaaacatgggtgtcactttttaagagcaaaagggggctgatggttggaaaaccagatactagaagaatgctggttttcataagccacacctgtggattgtcaaaaagaaaaagcacacatttcaaaagcagaagagaaagaaaaaaataaggcaaaagtgctcacaagtatcagaatagattttgtggctctggtctctggggatatttgcgagcactgtttagtgccatgaatgtatcagacttgccacttgtaccggtgagggaaaaaatatcttggagccactggccccatgccatgattcccaagcaaaaaacatcaatacaggagaaaataactgaacacattgattttgtaattgtatcaactaatagatgagaacaatatccaaggtttgatttcacagtgatatttctgctactccattggctagtcattctcatgggaacaatgagatttaccagcaagtgaaacacccagctcacaatacagggagaattaatatgtttggggggtttgaatttgagttctgcccacctggagtttgtggggttgatacttaaggcctggaagccacctaaaagacagatggtgttgagagaatttccccaggccactctgtgacaataaaagacaagtttacatccaacatcatccaggaagtattgcaacccaaaagctgccatcttctgagggattcctccacaaagaaggattgatgtattggctaacacaagatggttggttatttgctctaacggtctcaatctgtgtctcctaaaaagagaacagatataataacaaaggagtaacgaaaattccccacaatccctattccagtctgtgtaaagataatcacacccattgctacatcaatagatagcattccctcagtgactgagagatgatgcttttgctcagatccaggaacctggagaaaaatggaaggaacacatgaatttcttcaagtgaaatgaaatgtacttaatttctttcaaatctccttcctgggacccctatgctattgtcacacataaaaatcccatccatgaaggttttttctcctcaccacctagtatatctttcttggtacctataacaacagaaattatcttactggattatcttatttctattgaaggaagaccatttcctccaatggaaagatgaaggtcatgaaggcagacatcttgtctaccctgttttcagcccataactaaggtttagaacaacatactgttaagcagtcagtcaatatttatcacatgaataaatgaatgaactactgaacagagtcattatttccgtgtcaaaaattatttcaatgtgttctttaccttaatagatttattaacatgggaagcagaatctctccttgatagttaaaaatatctagtgcattaagctaattgcgttattcgaaactacatatccttgcttgatttgggggttttgctttgttttgtttgtgtaaaaatttggtcttcttgagagacaagtgttcagtgtcctatgttgcacttgattctatcaaatactctttgtcaagcatgatctttctataatccaaaacaaattttggaccaaggacccaaactgaattaggcagagtaccttaataataaaacattaacaaagatatagtccaggaatacacatgattaatatcaaaatgaacattagatataatctcatcttggccgggtgcaatggctcacgcctataattccagcactttgggaggcttaggcaagaagatcgcttgagtccaggagttcgagaccagcctgggcaacacagcaaaaccctgtctctacaaaaataaaacaattgaaaaacaaaacgaacaaacaaaaaagaattaatctcatttcattggggaaaaagactaacgtgaccacaggcaccacaattattcaatatttttctcacctggtcaataaaatggaaggtaaagtttatccctctttgggaaagttagatgatttttatgttacattcaaagaaacaactaaaatatttagaagtaataagatagtaatttgcccaaatataacataaataaaagaatacactgtgtataaacactttgaaaatcttaggagtaatctagatcagtaatatgccagaaatatgagcattctcaatcaaaaagtggaaaataaatcttgaattagtagaatgaaattccatgttcttggatggaaagacataatgtgctctcaagatttgaaatttcctcaaataaatttgtagattcaattcattatgaatcaaaattgcaagggactattttaggagctatacaatttgcaacaaattttaactacattgctcaagaaaatccaagtcattttcccacttttttaaatgaaaagttttcaacatacagaaacttagccatttatttaaaaaagaactggattaatttcctacctaatttcctaaaacctaatacagcaattaaagtgtgtagcacaaaaaaagaatagtcacacatatcaatggttcagaacattgtccagaaaagttatttataagttggaaattcagcaaattagaatataattgatcaatattaaggatctagaaaaacagatgaatgatttgggaaatatacaattggatggccaaatcaaatcatacagacaaatttcagggcaaaaagaaaaaaattaggaagagatggaactctcttttctcacacacagaaagaaatagcagaggcgcatttggccacaaacctgatggctaatcctatgtggactcttggcttgagcaaaaagaggggagatgcctccccaagatccatgtaccctgaggttcagtgagatttcattaactcactaaacctttgccagcattgacctctgtggtaaccactgccctgaactgcatatattctttcaaggtttttatcgctcccctggaacacagagcagaaggtagggtctacatcaggtatgtgattatagggtcagtatcacatctcagaatccaattctcagatccacgtagctattacaagggagggtccagctgagaaaattcactagtaaacacgccttcttctgtagttgagtctggtgtttattccaaagagtattatgtggatttgaaggtcagaatccttaataacatgtaattttctgctgcaccaattctaataaaattctggacaatgccttgaaattttcacgcagtgcatacacaaaaatgttcagtataatgaattgcccaagtgcagtctcaccttgacaaggtccagtggaaacaaaagacactaacatttatttaagatagcttgtgcaccaggcctacaattttctctattttaatttgaattaatcttgtccccatgcttaaagaatctcaggttaagaacaaacattctgcagaaggatgggctaaaaatcaaagaacaaatcaaggaacagaggtggaaattcagacagaacttatacagggaaagagttaaggagacattgcaggaaaatgggtaagaaaagtaaataatctgcaaagaccagagaatatctcttcacagtgaaaatgggctctattatgactctggtatagtctcatgaaaaagcattaatggtccagacattgtatagattcccatgtctaaatattcaccccttttctttcccagacgatttttaagtctgaaataaaaactccactcacctaagtaacctccattccaggatgttgtacctaatgtttaccagatttgtcctgagagagaaagctaagcctttagttttcattgccttgacctcatctctctctagagctgtgattattatgttatttctagcatcagtgatagtgtctccaagaaaaatctgtacacattttttcttagcataattaacttatccaaattaattatgagtgtttacagagaacatcccaagatgctgccagaggtagctggagaaaaagttttctgaactccctataggggtgaggtcaaataattatgaggcctaaaaagtgagggattggagaataaacacatgattctggctatatttaaaaaaaactctaaggggtatatttcttagaagagaatttttgggttcctaaaaacctgatgaattctacctattaaagatttagtagaaaaaaaaagagaggagaggcattccaaagatagagcatgtgggacatataaacaaggtagcaagtgttgacctagaacccattataagaggtaaaataaatgagatgaggtggtgtggtgggaaccaacctactatggaccaagagtgtgtgggggtgaggaaatggagggagggagtgtggaccactctctcagtaaatatcattataaaggggtacccagggattgatgaggttaagggagaatttaaatactcatagaaggctgggtgaggttggcttatgtctataatcccagcactttgggaggctaaggcaggaggattgcttgaacccaggagttcaagactagcctggtctataaaatttttaaaaattgaaaacttagccaagtacagtggtacatgcctgtgttcctagctacttggaggctgaggtggatcacttgagcccaggagttcaaggctgcagtgagctatgatcacactactacactccaacatgagcaacagagagagatcctgtctctaaaataaataaataaataaatacttacgggtaagatctggcagatcagaatgtgttgaatttaagtaaacatatttacatttgttagattgaggcctatcattagtttaaaaagagtataatccatggcataagtaaaggaattaatcttaattttaaagaggaatatatcactcattaacataaatttaggaaaaaagaatgagtgtaaagtcaggattaatctgaattgtgtaaggaaatagagggatttctcaactaggagaggctgaagatggcttcaacttctcttaagaagcaggagacaagcatatttgaaaagagatagagaagcatagagacctgagagtaattgagaatatttgaaagcacagcagtggataatggcaggaagagttggaagatgaaacagaagagggctgttgggcagaatcatagcagggattcggattattgccaatgaaacatttatgactgatgccaatctacctagttgcttattcagctacacaagacttctatagtgtaactatgggagaagggaaatggagaccagattcaattaatatgttttccagttcagagtcatggaatgacaataagaaaggaattatggataccgaaagaaatagaaaggattgacaaaaatattacactaaagagagaaagaaagattgagatgaactggcatgacataaattgagactatatattaatggcccagaagccaatgaaagagaatagaaagatgtgtaggaaaaaaagctgcaaacatctacatggagaccccctagagtcttcataggacactaaattgtgcattcatagggtgaaattccataggattgggcatttaaaaaccagaaaatggtgaactaaacaattcccagagctcaaagacggacaatgttcaagatatgactggcttagccaggcgcagtggctcatgcctgtaatcacaacactttgggaggccaaggtgggcaaatcatgaggtcaagagttcaagaccagccctggccaacatggtgaaaccccatctctactaaaaatacaaaaattagccaggtgtggtgggcgtctatagttccagctatctgggaggctgaggtgggagaattgcttgaacccaggaagcagaggttgcagtgagctgagatggtgccactgcactccagcctgggtgaaagaatgagactccatctcaaaaaaaaaaaaaaaacaattaagtcactggatgggattaacaataggttacacaatggagaagaaaagatcagtgaattagaagaaatagcaacagaaactatccaaaatggagcaaaaggtgactatcatcataaagacaaaagatgacaagcattgctgagggtgtagagaagaaggacccttgtacattgttagtgggaatgtaaattagccattatggaaaacagtactgaagttcttcaaaaaattaaaaatagagctaccttagatctagcaatcccacttcggagtatatatccaaagaaaaagaaatcagtatctcaaagagatatctgcactttcacattcattgcaacattatttacaatagccaagatatggaaacaatctaagtgtccctcaacagataaatggataaagaaattatgagacatatatattatatacatatatataataaaatatagttcatcttttagaaaaataaggaaatcctgccatttgtgacaacatggatgatcctagaggacattctactaagggaaataagccagatgccaaaagacaaacactgaatgatctcactcttatgtggaatctaaaaaagtcaaattcatagatgcagaaagtagaatgatggttacaaggaacaggagtaggcagagggatctaggtcaaagtgtacaaagtttcagttatgtaggatggataagttctagaaatttaatgtacagcatggggactattgttaataatactgtattgtatacttgaaatttgctgagagtacatcttaagtgtactcatcaccaaaaaaatgctaactatgtagacagatggacatactaattagctcactgcagtaatcagtttaccatgtgtatgtatatcaaaaaatcatgctgtacatattaaatatacacaatttcaattttttaaatagagcaaaagagataaataaaatattgaatttttttgaaaggaacagagcttcctttacctgttaaatactatcaaatgggctgttatacatgtaattagaatcccagaaggaaaaaaggaaatatacatacatgtgtattttctgtttttgtttttgtttttgtttttgagacagaatcttgccctgtcacccaggctggagtgcaatggtgcgatctcggctcactgcagtcttcacctcccaggttcaagtgattctcctgactcagcctcccgagtagctgggattacaggcacccaccaccacacctggctaatttttgtatttttagtagagatggggttttgccatgttggccaggctggtctcgaactcctgacctcaggtgatctgcccacctcagcctcctaaagtgctaggattacaggcgtgaaaactcagatgttattgtgggaaaggtctgctgccagatttcagagaaaccaccaagaattttggtaatcacatgatgtagtgataatgggatatagtgacaaaattggagatttgagagtcctcaaatactaatacccagattcttatgctacatgcaggcacagctaaagaattaagctgaaaagctctttaaaatagtatgaaaattcccaatttttacataacaaagaagcaaagtaccataaggcttttatatgaatgccatcaacagccatgccctaagaatgtgagcaaatgtgagcaaatggagatagactaaatcttgcaaactttgcaaataagctctgaccacactcagtaccagctcagattaaggtgatcaactgcacaactgtctaatacagaaaaaaggtcacctaaaacaataaggcttaatacaattaaaaattatgagacattctaagatgcaagaaatgtgactaacaatcagcaaaaacaatatcaaatttaagcaaacagatggcccacatattggagatagtagacaagggctaaatatatttcctcaaagaatgtggggctgtgcattttgcttggctccaagggactggcacagactcttgccttggttttggctctctctactgcagtagcttctccagcagcagcagcagaagctctaaagggacagaacactttcctccctactctttggactcagacatttaaggaaatctttgataggtctaactacagagatagccaaacagaattttcaatgatcacacacaaaaggaataaacactctgcaaaaaaaaatttgagaaagtcacaaatggatgctctaatcctcaatgagcaaaaatcagcagtctctgaggagttagagaatcattttttcagaattaccacattataatattgacagtatccagctctcaaaaaaattactaagcatacaaataaataggaaaatatggcccattcacaggaaaaaaaaatctgatagagaccacactcgaggaatccctgacgttgcaattactagtgaaaaacattaagtcaacttttaaacatgctcaatgagtaaaggaaaccatgaataaagaactaaagaaaacctgaaaattacgtgtgaataaagtgagaatacccctgaatacctataaagatatagaaaggaaccaaacagaaattctggagctgaaaagtacaataagtggaaaattcactagaggtattcgacagcagacttgagcaagaagaagaaaggatccgtgaacttaaatttaaggccatcaaaattattcagtctaaggagcagaacgaaaaaaagaatgaagaaaatgaacagagtcccagggatctgtaggacaccatcaagtgtaccaacatatgcatcataggaattctggaaggagaagaaaggagcaggaaaaaattaaagaaatagtggctgaaacttcccaaatctgatgaaagacaagaagctacacctaagctcaacaaattttatcttaactacatgtaaactcaacacacttcaagcaatataaagtcaaagaaatttacaggtagatttacaagtgaatcatcacatatgatagatgctcaataagatgaacagttgatttctaaacagaaaccacagaggccagagggcaatggtatgacacatttaaagttctaaaagaaaaaaactcaaccaagaattctgtatctagcaaaactgtccttcaaaaataaaggagaaattaataaaggagaagcataaaaactgaaggaattcattaccagttgacctgccctacaagaaatgtcaaagggactcttcaggctgagataaaaggatattagacaggaacttgaagccattagaagaaataaagaacactggtaaagttaactacacaggtaaatacaaaatacaatttattgtaattcttctcttttcctttgtgatgtaaaagacaaatacatagaacaataattatgttattgttctattgtctatgttaatgagaattcagtgtgtaaagatataacttatgagaataacaatataaaggagaaagaagagaaatgaataagagcagtgtttgtactctattgaaactaagttgttattattcaaactcttaaacagccaagggtcaaaaaagacagcacaagagaaattagaaaatgccttgagacaaattaaaattaaaatgcaacatactaaaacttatgggatgcagggaaagcattactagagggaaatttatagctatgaatgactacattaaaaggagaaaagttctcaaattaataacctaactttacaccttaagactctggaaaaagaaaagcgggctaaacctaaagttagcataggaaaggaaataataatgattagaccagagatacacaaaatacagaataaatgcaatagagaaaaatcaacaaacctaaaattggttctttgaaaaaaaatcaacagaattgacaaacctgtagttagattaagaaaataaagaaagaaaactcaaattactaaaatgagaagggagagtgagagcattactaccaattttacagagataaaggggattattagagaatattatgaacagttgtacaccaacaaattggataacctagataaaatggataaattcctagaaacacacagtctaccaaaactgatgcaagaagaaacagaaaatctaaatagacctataactagtaaggagattgaatcaatactttttttaaaaacactttattaaacccctccaaagaaaatctcaggaccagaagccttcattggggaattctacctaacagttaaagaagaattaacaccaactcttctcaaattctttcgaaaattgaagaagagggaggactacctcattcattctaagaggccagcattacgctgatacaacagccagacaaagatactaaaagaaaagaaaactacaagccaacatccctaaggaagatagacgtcaatatcctcaacaaaatactagcaaaccaaattcagcagcatattaaaataactattcactatgatcaagtgggatttaccaccagaatgcaagagttgttaaacatagaaatatcaattaatgtaatacaccacattaatattatgaaggaaaaaaacccaagatcatatcagttgatgcagaaaaatcatttgacaaaatccaacagtgtttcatgataagaatactcaacaaattaagaacacaggggaacttcccccaacatgataaagatcatatatgaagaactgtccagatgcagtggctcatgcctgtaattccagcactttgggaggcagaggcaggagggtcatttgagccctgggtggcatggtgagactccatctctacaaaaatatattaaaagaaaatagccaggcatggtggcatgcacttgtggtctcagctactcaggaggctgaggtgagaggccgaggtgggaggattgcttgagtgcagaagttgaggctgcagtgagacatgtttgtgccattgcattccaggctgggcctcaaagtgagaccctgtgtgaaaagaaaacccacagctaaaatcacactcaataatgacagaccgaatgtttttccctggatgattaaaattttctaaatctggatagtgatgacggttccataaccttatgaatatactaaaaaccactaaattgtacacttttataaaagtatgcattttatgttacttatatctcaataaagctgttatttaaaatgaacatgatatggtctccaccaccaagaagcacagaaacaattttggaacgttacagaattgaaaaagatgatttctcagcaacaaagtccttatgtgcacaataaagtgattaatatttcccaggtgctttgataagaaatatatattgagagctagctatgagagaagtcttctcttgtttcttttgtttttttttcttttttgattgttactttaacttttttctagagaatctgtttaaatgggaaaatgccaaggtaaatattctctattgacatgattcaacattttttgtataaatactgataaatgcttatcgaattaattcatatttaaaagaatggacatttacttgggtcatattggtgtttctattggtgagaattttgacaaaaccgagatgcaccttctttttttttgttttttgaggattgtagttttttttttattattatactttaagttttagggtacatgtgcacaatgtgcaggttagttacatatgtatacatgtgacatgctggtgcactgcacccactaactcgtcatctagcattaggtatatctcccagtgctatccctccccccgaccccaccccacaacagtccccagagtgtgatgttccccttcctgtgtccatgtgttctcattgttcaattcccacctatgagtgagaatatgcggtgtttggttttttgttcttgcgatagtttactggggatgcaccttcaaaggggaaatgaagaataatttatttatttttttctaatttttatttatttaaaaaaaattttttgagacggggtctcactctgtcacccaggctgaagtgcagtggcgcaatcttggctcactgcaatctccgcctcccaggttcaagcgattctctcaccccagcctcccgagtatctgggactacaggcacctgccaccacatccagctaatcttggtatttttagtagagatgaggtttcgccatgttggccaggctggtctcgaactcctgacctcaagtgatctgactgcctcagtctcccaaagtgctaggattacaggcatgagccaccatgcccagcaagaataatttaataaagagagtatttacagaaatgtatggacagggttaagggaaaccaacaagggatagcaaactatttgaagctagcagcaccgatagccattgcccctcctcctagaccagaaggagttgaggagaaaatggttaccaaagcccaggatacagcaagacccaagacagcctggcagagaggggctggaggaatgaatgctctgacatcattgcaactaccctttcatcctctgctgaagcctcccattcactgacctcatccaaagccaagaggtgagtccactgatgtaatctacacaggccagcctcctgggcacatagtagagtggagaaaggtaaagggtggacctaggagggaaaatgaaaaacaggtggcagagatcaatctatttgctcctcacttgctctttagaatgggggattccagccaacccaggtttttaaccaaagagctaaagacacagagggaaaggatggagaacgctctttgttggcacaactgcagtaattgcacttgatctttgtccagatgaaaaaaaaatctactgtcaattcagccatatttccatcagaggtcttcataaaaggccgcagaaatgtgttaaagaaataattagtagcgggatgtggtggcacgcacctgtaatccccacctacataaaaggcaggaggatcacttgagcccaagttcaagaacagcctgagcaaaatagcaagacctggtctcaaaataaagaaataaataaaaaatttatttttaaaaataagcaattagcaaatataaaaaagtggctgctatagtcaccacttctataactagtcctgacgccagggtgctgaatacataattaattgattgattagaaatgcaagagactattctgtcattaattataattgcatgcatgcagttgccctggatatttcctgtgaaagactttatcatcttaattatagatcttccaaaagagacagccttaaataaaatgtatagatatgtctctcttttgcgcagggggtggaggggtacttagcacatggacacctttttgtgtttagagaattcactattttattttattttatttttgagacagagtctcactgtcacccaggctagagtgcaggggcgtgatctcagctcactgaaacctccacctcccacctttaagcgattctgctgcctcagcctcctgagtagctgggactataggcgcacaccaccacacctggctaattttgtatttttagtggagacgaggtttcgccatgttggccaggctggtctggaactcccgacctcaggtgatccactcgcctcgacctcccaaagtgctgggattataggcttgagccactgcacctggctcatcagaccatttcattgtcatgttttgaacattgttctggggggcttagactctcaatggtttgttaaggagctcttttaaaaaaaataaactctttgtatttttaatcagcctgattcagcttctgttgtgtgtctgttacaaagaagtaagtgaatttacaacatcttgtccaattaaatgggatttaaagcaggaacttagaagctacctaaaaaggagttattaccttagaattaacaggctgttggatgtcagggcccatgttaggaaagattatgaagattaagaaaagaagacccagagctctgctcagattaactaaattcccaagctgtaaagtaattaccccaagacccatggtcaaaagaaatggattatgatccctgatataggaaaaaaaaaaaacaaacctacaaaacccagaataaggaagagataagcgaccaaaaatataccatccagatcattaaatcatttggaattaagaaaatgtttactgcagtactggttctcactcctacaaaaaaagaaaggaaggatagaaaaaaccatattggtttttggtttttttgtttgttttgttttatcagagaactttgaagtatttagcattttaacctggtctttaatggtccaatatttctctaccatgactggcaagatttgtgtggctgggaatttaatcagaaaagtaaagagaagtgatttccccacaaactctcagatacacgtggcagatgtggttggttctggatcttgaatatagcaccattataatgtagagaaggcaaagcaccataggactgtaacttgcaaaaattttcatgcaaagattgctcccccagggccaaaagttggaactttaaaattatttatggacccaatcccctttctgaaggtgagttgatgtacccctgtgcagtagtatttgtctattacatttttcatcagagagtactttagacaccaagctttcttttctgagtggctgcgtaaatttatagtcttagcactctataacaaggggtaagcatagcaatgaaatatcactgaggaatttattgatcctttattgagatatggcgacatgattgcaggacagaaaagaatggattcttgtcaaagccaggatttgaattcagccagttcacatttttaaccatactatactgtatcttggagggtctgaaggatgcacaagacaaggtgaattttttgccaagaagtccacactcaacctctggggtaggctgaataacggtccccaaagatgttcacatcctaacccccagaacctgggaatatactgcagtttcccttacatggcaatagggatgttgcacatatgaagctaaggatttttttttttttttttgagacaaagtcttgctttgtcacccaggctgaagtgcagtggtaccatcctggttcactgcagcctcgacctcccaggctcagcaatttacccaccttggcctcccaaagtgctgggactacaggcatgagccactggactggccgaaattaaggatcttgagatggagagattatcccgaattatctagtgtgcccaatctaatcaccgggtccttataagagagagaagatgtaaggacaaggcagaggtcaaagaggagagaagaagccacgctgccggctgtgaaggttttactcgtagtgactgtgaagccactgccagtaataagcagagaagaaacaggatctgatttgcatttcgacaggagaatgacttcgcagggaagggatagaagcagagagtccagttagaaaactattgcaatatcccagggaagaggtgatctgtgtcctggcccaggtgttagcatgtggaatacttcacagataaagccaatgggatttgccgacatatcagacatgacatacggaagaaagagaggagtctgtcaaagatgactccaaagatttcagcctaagcaaagggaaagatgcaggtgctgttaactgagacggggaagcctgcgggataagcaggtttgggacggaagatcaggatctcagctttggatacaagtaatttgagagcccattaaacattcaagtgcagaattcagaggagaggtttgcagtgccaatataagtttgagactaacggtggatacagagataccctgtccagatccctcttccaagcaggatttgctgcttcagccactgggagtgctgtcagcagacaactttctgctgtcaagtccttcaggaccagcctcaattgcagagagctgccttgaccaaatgcacacctctccggggaaagccccagtaaggaatataaggcccagcaatctgagccaaacagataacaagtctaataagctattctcttcataaatttgtacggctaaaacagaatacctgagactgggtaatttacaaagaacagacatttattttctcatggttctggaggctgagaagtccaagatcaaggcgctagcagactcagtgtctaatgagggtcttatctgtgcttccaagatggtgccttgaacactgtgtcctccagaggggagtaacactggtagaaggcggagggcaaaaaaggataaactcccttcatcaagcccttttataataccattaatccattcacgaaggtggagccttcatgacctaaacacaccccaaaagtctcacctcccaacactgttggattggagattaaggttccaacacacgaattgtgggggacacattgagaccacagcagctatctatgctgcagagctcttgcagggttgaccatggccaaggttgtgccacgtctaattcaaattctccatctgctcaaccctggctcccctctcccttccacaggcgtcaacccctaataagtctcttgcaccccaaactgcatcttagtgtctgcttccagagaactcaaacaacaacagccctcaacagcatatagacggttatgcaaagcctagaagttgcatttaccttattaacaggttcttaaagtatttcatgccaacttcccaaaaaaatagactcttctctgtccagtgagcctaacatcctgacctggagaggcaagagcaggattttttaaaagcacttcatagaggccacagtaggaaaggccaaagatgcccaaactcatcagtattcagaatattctaattaacacacaatgaggccaggtacggtggctcacaccagtaatcccaacacttagggaggccgaggtgggaggatcgcttgagcccaggagttcaagacccacctgggcaacatagcaagactctgttctccacaaagagaaggggaaaacccacaacggcataccatttcatacccagcagactgtcgaaatgtaagtctctcaatatcaggttttaatccatagaataaaataaatatccacacttctcggccgggtgcagtgactcacacctgtaatcccagcactttgggaggccaaagcgggtggatcacttgagatcaggagtttgagacctgcctggccaacatggtgaaaccctgtctgtactaaaaaaaaaaaaaaaaaaaaaaaattagccaggtgtggtggcacacacctgtaatcccagctactcaggaggctgaggcatgagaatcacttgaacccaggaggcagaggttgcagtgagcagagatcacaacactacactccagcctgggtgacagagtaagactccacctgaaaaataataaataaataaataaatcacacttctgcatggatcgaaataaaaaaataaatacatgaggagaagggatggttctatctttcagtagatttacaatttataaatgtaaaaggagaaaggaatatgaaaaattaccattagtcaaatgtcacagcaataactgttgcagacaagatccaccaatggatgctaaaatttgtgggcaaaagtttgagaaggaaaaagacttgtatagtctcaaaaaatctccttcaagatagtttttaattaccaaggggaaaatagtaactttacagtggagatgtgcagcatacagcaatttaagtgatcaaggtcagcatcaccagcaataagatacactgacatcaggtgcctcctgatatcatgcactgagaaggacacaacatcatttctgtggcgttcttggcaaaaactcataactttagtccagtcatgagaaaatgtcagacaagcccaaattgaggaatatcctataaactaactgatcagtaccattcaaaagtgtcaaagtcagttgggcatggtggctcacacctataatcccaaagctttgagaggttgaggcaggaggattgcttgaggccaataattcaagatcagcatgtgcaacacagtgagaccccatcctgacaaaaaaaattagccgggcaccatggcatgtggctgtagtcctagctactcaagaggctgaggcaggaggatcctctgagtccaggagttgaaggttgcagtgagctatgatcgcaccactgcactccagcctgggcgacagaaagagaccctacctcttaaaaaagcaaagtgtcaaagtcatgaaacacaagcaaatacagaggaaatgttcctgtctagaagagacacaacaactgaacacaatatgggagtctggaacagaaaaaaggaaaaaaaaaggacatcaatagaaaaagtgttaacattcaaataagattggtagtttagttgatactgtgataccaatgttaatttcctagttttgatcattgtgctatgctaataacaatagggggagcaggatgagagatatgtgggacctctctgtactatctgcacttttctgcaagtctaaaattatctagcattacagcttccacctcactctctgcgttaacttgctcaccatctggccctccccacagtccccatcatgtggcctagcttcccctagagcaagtggacccagaggagtgtgagtgagcccccttggaagggcattctccagttcctttaaacccttctgatgactgaaccccaggccagtgccttcgaaccagaaccatgtggataagctgctctcaaatacttgacccacaaaaagtgtgtgagacaataaatgtttactgcttttacctcccagattttctttttgaaattcagaaagttgttgttgcacataatgacgactagatggcaccagaattccaaggatagaagcaggctgccagcatcatgaactcaattgcctctgagtttgtttacaaatttattgcaatcccaatacagatatcatcaagggttttgtgtgtgtgtttgtgtgtgtgtgtgtgtgtgtgttttctttttttgccccagagctagaaagaagcagtagcagccgtggctgccaccaacttaggcagtagctctaccaaatacttaaaacgatataagtggccaggcgtggtagctcatgcctataatcccagcactttgggaggctgaggcgggtggatcacctgaggtcaggagtttgagaccatcctggacaacatgatgaaaccccatctctactaaaaatacaaaaattaactgggcatggtggtgggcacctgtaatccctgctactcgagaggctgaggcaggagaatcccttgaacccgggaggcagaggttgcagtgagctgagtttgcaccattgcactccagcctgggtgacaagaacaaaactccgtatcagaaaaattaaaaataataaaaataatacaataaaaataaaacaatatgtgcccttgccatggttggggctaaaaaaaaaaaagtaaataaaaacaatattttaaaatgtgttactgatgcataaataagcagacagatcaaaagaaggttagaaaatccaaagacagaagcaattgctgatggagatttatatgatgatatagtaatttctaattcaggaagggactttagaaaaggttttaatttagtagtgtagaaacaactagatgaccacgtgaaaacaaagaagcttgaatgcatttcccaccccatataccagattaaatcctaaacatatcaaagatctaaatgaaaaaacacagcctcacagataataaaacactggtgagttccctcattaccggggagggtgtaaattttccaaactattactcaagatccagaagccataaaagagaattttgttaaatgaccaaacaaaaaaaaaacaaaaaccttttgcgtggccacaaaataagccatacacaaccaaaaactacagatgacaaaataagaaaaatatttaccacttatatcacagaagagaaagagttaaaatccctaaaatataaagtgtctaaaaattaagggaaaaaaaacaagaaacctattgaaagcgggcaagatacataaacagagagttcacgttaaaaaatgcaaatgccacctaaatttataaaaatagccagacacagtggctcatccctgtaatcccagtactttcgaagggaaggtgaggggattgattgatcccaggagtttaagaccagcctgagcaagatgacaagaccttgtctctaaataaaataaaataaattagctgagtgtggtggcacacacctgtgatcccagctactcgggatgctgaggtgggaggatgggaggactgctggagcccaggagttcaaggctgcagtgagctatgattgcaccactgcactccagcctgtgtgaccgagtaagaccctgtctcaaaaaataaaaaataaaatatcacacctgtaatcccagaattttgagaggctgaggcaagcagatcacctgaggtcaggagttcaagaccagcctggccaacatggcatggtgcatgccatgttgcagccaggcaacatggtgcagccaggcatggtggcatgcacctgtaatcccagctactcaggaggctgaggcaggagaatcgcttgagcctgggagacgaaggtggcaatgagccagccgagattgtgccactccactccagcctgactggcaaagcaagagcctgtctcaaaaaataaaaaataaactaaagctcagcctcactcataataaaagaaacacaattaaaactgccctgagatcctatttctcacctaacagattagcaaaaatccaaatgttggacagccctcttgttggcaacgctgtggggaaacagggactcttccattttactgatggaatataaaaagataaaacctccatggaggagaatttggcaatatctagtgaatttgccctttgactcagcaatcctacttctaggaattaggtccaaagacacagacagaaataggaaacttcatatgaacgtgcctcttcactggagccctacgcatgatagcaaaaaactggaaactattgcaatagccatgaagagggtgctgcttaattcaactatgctatatccacaaatacagagcactgtacagctgtgaaaataagatatattaagattacatatatatgtgatgtgtgtgtatgtacaagtgtgtacacacgtgtttttttgttttgtttttttgactatttgtttgttttgttttgttttgagacagtcttgctctgccgcccaggctggagtgcaatggcacgatctcagctcactgtaacttgcacctcccaggatacaagccattctcctgcctcaacctccctagtagctgggactacaggcacgtaccatgacgccctgctaatttttgtatttttagtaaagatggggttttgtcatttttaccaggctggtcttgaactcctgacctcaagtgatccgcccacctcagcctcccaaaggtcctgggattacaggcgtgagccaccacacccggcccatgtgtacacacatatatagtcacctccaagatgtagttaagtgaaaaaaccaaggtgcaaattggtatgaacaggatgtaccttttgctcaatagagaggaaaatgaatacatatgttcattggtttatattttccaagtaaatggaatgtcaaaacaatttttgcgattgggactcaatcacccacaaaacaatggttttggttttttgttttcttgagacagggtcttgttctgtcacccaggatggagtgcagtggtatgatcacagctcactgcagcctccacttcctgggctcaagcgatcctcccacctcaacctccagagtagctgggactgcagacgtgtgtgaccacgcccagctaattttttactttttatagagatggggtctcattatgttgcccaggctaaaacaatgtcttaaagtaatttaagatatattaatttgacataaatccctaatggggtatatcctcctggaaaaaaaagcaccataagaaaatcttaaactatatttagtcatcatattactagtgatagtattgatattttaaaattttatatatgcacatatatattcagatatgcatatatattcacatacttcaaaacgtatgctgatgtcactacaattcaaaattctctttttttctttgagaattcaacattctctgaataagaaaaaagaggcataataataacattttagaagttgtaaagggcaaaactaaactatggacacacatttggataactaattactataaagaaacacagagatgattgctataaaagtcaggctggccaggcacggtggctcacgcctgtaatcccagcactttgggaggtccaggcgggcggatcacctgaggtcaggaattcaagatcagcctggtcaacatggcgaaaccccatctctactaaaaatacaaaaaaattacctgagtgtggtggtgcacatctgtaatctcgctactggtgaggctgaggcatgagaatcacttgaacctgggaagtggaggtagcagtgagccgagctcatgccacctcactccagcctggatgacagagtgagactctatcttaaaaaaaaaaaaaaaaaaaagtcaggctgagggttaattttggtagagagaagggaggggctgggcctgggcgcctgggctagggcacgtggagaggcttatgaacagctggcaaattctatttcttgacttacatgtggttacaagtggcttgccttaaaataacacaatttgtgtgtttcgctgaatttcaggaactcctattttaagaacttcctggggttttttttttttttttaacaaagaaatgtagtactttgttttttaaaaggaagatttttattatatgaatcaatacctaataaattagaagcaaagcctcttgcagagaaaaagatccaccaataaggagatctgcgtttcttcaggggaaaaaaaaaatcatctccatcacagaattgaaaacaaaggaataatcgtacagatttgggaagctggggactttgcctttgttttccttattttaaattaggaatgctggctgatgaaatcagagcaccctgtgaaaagaactgtaccagacatcttgatcagcaccattttgggcctctgcaatgtcaaataaatttgaatatatttttgcttttacaacgttatgctagctgtgaaaccacttgaaatgcagcatttcctgacaatgacaaagctcctccacgggaaactctctttctttctaatgtgttaagaaatagacttacatcaaaaagaaaagcattctctatgaaacacaaacgctttggaagtgtctaaaggtgccacaaaggttgcaattctctctccacttgcaagaatttttttttttttttcccgagatggagtcttgctctgtcacccaggctagagtgcagtggcttgatctcggctcactacaacctccacctcccaggttcaagcaattatccagcctcatcctcccaagtagatgggattacaggcacatgccaccatgcccggctaatttttatttttagtagagacggggtttcaccatgtttgccaggctggtctcaaactcctgacctagttgatccacccacctcagcctcccaaagtgctgggattacaggcgtgagccaccaagcctggcctttttttttttttttttttttttttttaaagacagggtctcactctgttggccaggctgaagtgcagtggtgtgatctcggctcactgcaaccttgaactcctgggctcaagtgatcctcctgccttggcctcccaaggtgctgggattacaggtaccaggtgagccttcacacccggctcacttacaagattatagtgagatcaaacgtggagaacttctgatccagattcaaatggtctagatttatattctggctccctcacttactagctgcgtgaccttaatcaaatcacttaacctctctgattctgtgaccacacacataaaactgagatatgacaatgcctacctcctagaggttgtcatgagaataaactgttttaacagaagtaagacacttaggacagggcaaagctatcttgagccttactaggccaagggaccagagaagctcagatccaagcactccatactgagtggccatgctgcaaaactcccacaaaccccaaatcaacacagattggctgggcaaggtggctcgcacctataatcccagcactttgggaggctgaggtgggtggatcacttgagcccagggatttgagacgaaagaaagaatgagagagagagagagaaagagaggaaggaaggaaggaaggaaggaaggaaggaaggaaggaaggaaggaaggaagttaggaagtttattctcttactgttctggaggtcagaagccaacaatcagcttccctgggcaagcaaacaagaaagagaaaagaaaggaaataacacagatttattctcttacagttctggaggtcagaagccagcaatcagcttccctgggctaaagtcaagtggttggcagggctgattctttctggaggcactgagggaagaccttatgtccttgtctttttagccacccgtatcccctggctcgtggccccctcctccttctccaaaagtggccctcggctgggtgaggtggctcatgcctgtaattccagcacttaggaagaccaaggcgggtggatcacctgaggtcaggagttcaagaccagcctagccaacatgacaaaaccccatctccactaaaaatataaaaattagccagacgtaatggtgagcacctgcaatcccagctactcaggaggttgaggcaggagaattgcttgaacccaggaggcggaggttgcaaagagctgagatcacaccactgcacttcgtctcaaaaaacaaacaaacaaacaaacccgcatccctctaatgtttgcttccattgtcacatcgacatccctctgaccaacttctcctgtgtccctcttgtaaggatctttgtgattctattcaggacccacccaggtaacccaggatcatttccccaactgaacaaacttaatcacatctgagagtccattttgccatataagggaacgttcacaggttctagggattaggatgtataaaccttcttaattattattaatacttagccaagccttgtggggcaagagaaactttttcttttcttttgttttttggttttgttttgttgttgttgttgttgttgtttgttgttgttgttgtttgagatgaagtctccccctgtcacccaggctggagctcagtggcacaatctcagctcactgcaacctccacctctgggttcaagggattctcatgcctcagactcccaagtagctggaattataggaacctgccaccacacccagctaatttttgttttttagtagagatggggttttaccatgttgactaggctggtctcaaactcctgacctcaagtctgcctcggtctcccaaaatgctgggattacaggcatgagccactgtgcccagccatgttttttttgagactgagtctcactctgctgcccagggtggagtgcagtggtgcaatttcagctcactgcaaactcctcctcccggattcaagcaattctcgtgcctcagcctcccaagtagctgggactacaggcacccaccaccatgcctgactaatttttgtatttttagtacagatggggttttaccatgttggccaggctggtctcgaaatcctgacctcaggtgatccgcctgcctcggcctcccaaagtgctgggcttacaggtgtgagtcaccgtgcccaaacttttttgttgtgttttgtttttgagacagggtttccctctgttgcccaggctggagtgcagtggtgcggtcacagttcacagcagcctcaaactcccaagctcaagtgatcctcccacttcagcctcccaagtagctgagaccatagatgcgtgccaccacacatgacttatttatttatttagtagagacaggatctcactatgttgcccaggctgctcttgaactcctggactcaagtgattctcccacctcgacctcccaactgctggcattacaggcatgagacactgcacccagccaggacatggaaactttggaggccacattattcagcctaccacagtctcaaagtgtggtctgattccattctgttggctgttttatttcttcaggtctcagaccttacgtggacctatgggtgctacttaggacgtaggtccagccagaagtcagagaaggctactggaactgccagttcaggacccttgagctcccctgttacatgcctttgtgcaaattaggaaaaggctgtcctcccttcctctgggtagacacagctccacaccaggatgtgtggctggtgaaagggcacaggttgcatttcagcctccacatgcctcctgggtcaaacaaatttgtgcagtgcacaacctatacaaccccagtttaaggcacagggcccccacctcaccctgatttaaaaaaaaaaattagggaagcatgcccagtcttattcttgtctttctcggtataatttagatctgcacaaactttctatcatgactcacacttcctgaaaccctggagcctcccagatgtgaaatcactgagagctggctcttcagaaacagtgactcctttaacaggcgggcttggaggacgtctcttgtgggtctaggtcttataaaactgactcctgcagggctgcctgggactggtgggaaacccttggtgactagggtcagggcttcgcagagccccagcgcagggtgagattggaagaattacacttccgcccaggcgcagagccctggcacagggtaggattggaagaattacacctccgcccttcggccaacgaccaacaccttcggagtctgcagaggtttggaggagtccgaggagacttcaaggcagagctggcaaggtctgggagggagcgtgggcttgctgcgttctccccgcgccccgattcctaccctcccgaaggagtagctgctctcttgtgggaaacccatccttcagcccttccacgcatagggagtggggtgggagggagagcacagcgccctgctctttgtgaaggctgcccccacagggacgctggcaggatccaccccataaacagtacagtctgggatcaacgacacagctctgtggatcctgggatatcccccgtcatctttcattctcatttttcttggacatactaaattcgtctcaatcggaatgaaattaacaatgatttttattttccacttgggtgttttttgtttttgtttggtgcgtagtttccaaatgttcaacaactaccatgaattacttttataatcataagtcaataatattgttataaggatgtttcagggctctgaaatcccagccggtaaccccagcactttgggaagccgaggcagaagtctgaggggcttgagaccaggagtttgagaccagcctgggcaacatagtgagatccccttctctacaaaaaaaaaaaaaattgaaaattaaaaaaatagccaggtgtagtggcacgctcctgtagtcctaggtactcaggaggtggtggaggtacagggtgcagtggctcacacctgtaattccagcactttgggaggccaaggcaggttaatcatttgaggtcaggagttcaagaccagcctggccaacatggtgaaaccctgtctctactaaaaatacaaaaaattagccgggcatggtggcaggtgcctgtaatcccatctagtcagggggctaaagcagaattgcttgaacctgggaggtggaggttgcagtgagccgagatcacgtcaccacactctagcctggacaacagagcaagactctgtctcaaaaaaaacaaaacttggccgggcgtggtagcacgcagctgtatcccagctactcgggaagctgaggcaggagaatcgcttgaacccaggaggtggaggttgtagtgagccgagatcatgccactgcagtccagcctgggcaacagagtaaaacagtctcaaactaaaagagaaaaaagaaaattttcagaaaataaaaacaatccctaatagtaatcacatcccgataatactgtgtgccaagatctgacccagaactgtctgtgcacttttgttgttgttgttgttgtttgtttttattttttcatacagggtctcactctgtcatccaggctacagtgcagtggcgcaattatggctcactgcagcctcgacctcctgggcttaagtgatcctcccacctcagcctcccaaatagctgggactacaggggcgcatcaccgcacccagctaattgttgtaatttttgtagagacagggtctcaccatgttgcccaggctggtttccaactcctggattcaagcaatccacctactttagtctcccaaagtatcagaattataggcgtgagccaccgtgagtagttctttttgtcagaatggcatttttcaggatatgcttaattggttagaaactaaaatgtggtacacccacacaatgggatattagtcagccacaaaaaggaatgaagtactgatccatactacaacatgactgagccacaaagacatgccaagcagaagaagaggcaaaagaccacacaatatatcattccatttatatgaaatatctggaataggccaatatacagagatggaaactacattcgtggttacctaggactgaacgacttgggggattagggagtgactgaatggatacagatacagaatttcttgttggagcccagacatggtggctcacgcctgtaatcccagcactttgggaggccgaggcaggcagatcacctgagttcaggagttcaagaccagcctggctaacctggtgaaactctgtctctaccaaaaatacaaaaattagccaggtatggtggggggtgcctgtaatcccagctacttgggaggctgaggcaggagaatcacttgaacccaggaggcagaggttgcagtgagccaagatcatgccaccacactccaacctgggcaacagagccagactccgtctcaaaaaaaaaaaaaatttcttgttggagtgatgaaaatgttctggaattgactgtggtaatggttgcacaactctggaaatatgcctgatatggtttgaatctgtgtccccacccaaatctcgtgtccagttgtaatacccagtgttggaggaagggcctggtggcagacgattggatcggggggtggagttctcatgaatgggttagcaccatcccctcagtcctgttctcgtgatagtgagttattattttgagatctgcttgtttaaaagtgtgtatgtgtagcacctcccccatctctcttcctcctgctctggccatgtaaagcgctggcaacccctttgccttctgccgtgattgtaagtttcctgaggcctccccagaagcagacgctgccatgcttcctgttcaacctgcggaactgtgagccaattaaacctctttacaaattacccagtctcaggtatttctttatagcaatgcaagaatgacccaattcaatgctaaaactaagtaatcgtatcttttaaattggtggattttataatatgtgaattctatcttattagagctgttcctaaaaataaaacacggtggctcacacctgtaatcccagcactttgggaggccgaggcgggcgggtcacctgaggtcgggagtcggagaccagcctgacctacatggagaaaccccgtctctacgaaaaatacaaaattagccgagtgtgatggtgcatgcctgtaatcccagctactcgggagcctgaggcaggagaatcacttgaactcaggaggcagaggttgtggtgagctgagatcatgacatcgcactccagcctgggcaacaagagtgaaactccgtctgaaaaaaataaaataaactaaaataaaaataaataaagcaaaaagcctaggggcaggaagtcgaattaccttgacttctacttactgtctgttacgtctagcacattgcctcatgacccaagacaattgcttgagctctagacatcacatgtaaattccaggcaatgaaagcaaggaaggaagaagggcatggcatctcccttgcaatgtgaattactggaacttgtgcaaacatttccatttacgcggttttagtgcggacacagaaacaaagccacatctagctgcaaagggggcttttcaatcccaccattatagggagtcatgcttgaagggggttggaagggtgttgaccaagccaatcccaaagcgaagttattaaccccactttaaagatgagtaaactgaggcgcagagagtggaagctgcctgcccaaggcctcagctattaggtggaaggaaaggaaaggagagccactgtgctcaaagattccggctcagatcaggaaattcatcaaagatgagccatcccactcacaccgagaccatactagaattagtgtgaccagttctggatatgtgtcccttaatagagccagtgaggacgtggtcagaacagagatgaggctgaggtttatgaaaggcaaacacattcaatggttaacccaggcctgaatcaggctgcctggatggacaggttgtttgttttttgttttttgggacaaagtcttgctctgttgcccaggctggagtgcagtggctcgatctcggctcacgacaacctccacctcccaggttcaagtggttctcctgcctcagtctcctgagcagctgggactacaggcacgtgccaccatgcccggctaatttttgtatttttagtacagacggagtttcaccatgttagccaggctggtctcgaacccctgaccttgtgatctgcccaccttggcctcccaaagtgctggaattacaggtgtgagccaccacgcctggctgatggacagtttttataagctgttatcaggaaggaatgcttttggctgcaataacaaaaaaaaattttttttaacctgatgaacactagctgaaacctataagaaattaattttatgcctatttttcaaggtccagaggaaggctgcctggaaccatttttctggctcaggtgagcctaaaaaccaagtccttatggaaggctcactcaaggccaggagttcaagaccagcctgggcaacacagcaaaaccccatctctaaaaaataaaaaacaaaattagccggcgtggcgacatgcatctgttgtcccacctacttgggaggctgaggcaagaggatctcttgggcccaggaggtcaaggctgcagtgaactatgattgcaccactgcactccaacctgggcaacagagtgacaccatgtctctgaaaaataaaaataaaaaaatacattttttttaaaacccaggcctctaggaatcagaggttttctgtgggtccctaaagaatgtccatttaactttattaatacttccttagagaatcagctccaaagacagctaaacataacacaagcggttagggcttcaatgtagaaactttggagggcacaaaacataataggggtgcacattggggtgacaaccagaaggaactgggaaatgtgattgctatgaaagacagcacaggctgagagtggtggctcactcctgtaatcccagcactttggaggccaaggtggacagatcacgaggtcaggagttcaagaccaacctggccaacatggtgaaaccccgctctactaaaaatacaaaaattagccaggcctggtggcacgtacctgtagtcccagcaactcaggaggctgaggcaaaagaattgcttgaatccgggaggcagaggttgcagtgagccgagatcacgccactgtcacccagcctaggtgacagagcaagattccgtcaaaaaaaaaaaaaagacagcacagtggctacccaggggagcagggagaggactgcaatggggaacacggcggggttcctggggtgcccagcaatgttctgttcttgaagcaagtggaagttaaaaggctgttgtcttatctcattaaggtagactttcgtttggtgtagctggcttccttccttccttttttctttctttttctggagacaggatctcactctgttccacaggctggagtgcagtggcactgtcatagctcactgcaacctcaactgcctctgctcaagtgatcttcccacctcagcctcccaagtagctgagactataggcacatacctccacacccaacaatttggtgtcattttctgtatatatgttttattttacaaccataggctgataaaataggctcccaggcccagcgcagcggctcactcctataatcccagcactttgggaggccaaggtgggaggatcacttgagcccaggagttcgatgctgaactcagctataaccatgccactgcattccagcctgggtgatagagtgagactctgtcttttttaacaacaaaaataaaaaataaaataaaaataaaaataagatgtgctcctctgctcctgcttcatcatccaaccctgtgtctttcttcctcctcgttgcaaaataactcctgcatctccaggttgcacatccacgtctccggcaggaagtgaagggcaaacatctagaaacatctagagtcttctccacataaagttttgccttaccatttagaaagaaaaccctcttcaggcccacaacaacctctgcctcccaggttcaagtgattcttctgcctcagcctccagagtagctgggattacaggcgcctgccaccaggcctggctaatttttgtatttttagtagagacggggtttcgccaggttggccgcagtagtctcgaactcctgaccttgtgatccacctgcctcggcctcccaaagtgctgggattacaagtgtgagccactgcacccagccaaattaattgattctttaaaccctgacatcttagagcaccgatccccaacctttttggcaccagggaccagttttgtggatgacaatttttccatgggtagggtgggtgaggtgggaatggggggatggttttgggatgattcaatgacattacatttatcaatagcttctcataaggagcgagcaacctaggtcccttgcctgcaccgttcacagtacggttcacgctcctatgagaatctaatgccaccgctgatctgacaggaggcggagctcagcttccctggctcacctgctgctcactcctgccgtgcagcccagttcctaacaggccatggacccatatcagtccatagcctgggggttgggaatccctgtcttagactactaagtcccattttcctgaattcttgtggcatcaatttttcatcagccaagcatctaaccctccagccacagcccttgaacaagcttgcctctggtacttcagctcgactaatcttctgcaaaatcagtggtaactgggccctgcccctccaccgtggatatggagaacggatgccctgcatctactcccaaggcctgcctactgtgccctggagtactgtagaagctggaaagctatttttaaaatagtaacttcaccactctcacccaaataatcaatacttaattgccaaatggttttcagtgcttaccctcctgtcttaaaatatcacgtagaccaggcgcggtcccagcactttgggaggctaaggtgggcagatcacaaggtcaggagatcgagaccatcctggctaacatggtgaaaccctgtctctactaaaaaatacaaaaaaaaaaaaaaatagccgggcgtggcagcacacacctgtagtcccagctactcgggaggctgaggcaggagaatgaagtgaacccggcaggcagagcttgcagtgagctgagatcgtgccactgcactccagcctgggcaacagagcatgactcagtttcaaaaaaaaaaaaaaaaaaaaagatgtaatactaatagaaaatttgaggctgggcatagtggttcctgtctgtaatcccaccattttgggaggctgaggcagaaggattgcttgagcccaggagttcaagaccagtctgggtaacacagtgaatccacatctctacaaaacatacaaaaattagccaggcatgttggtgcatgcctgtagtcccagctactcaggaggctaaggtggaaggatctcttgagcccatgcagtggagaccacagtgagccgagattgtaccactgcacttcaacctgggtgacagagctagacattgtctctaaaggaaaaaaaagagaggccaggcgcagtggctcatgcccataatcccagcactttgggaggcaaaggcaggtggatcacctgaggtcaggagttcaagaccagcctggccaacatggtaaaaccccgtctgtactaaaaatacaaaaattagctggatgtggtggtgggtgcctgtaatcccagctactcaggaagctgaggcaggagaattgcttgaacctgggaggcagaggttgtagtgagccaagatcgtgccattgcactccagcctgggcaacaagagcaaaactccgtctcgaaaagaaaaaaaagaaaatgaaagaaattttgaggtaacagatgaggagatgattgctatggaaaagacagtttgttactcacagttcccaagaggaaggggcatatgattccatgggggaccacacgagggagcccaagtcagttaggagaagagacagaggaggaaactgggcacgaacttttaccgtggttgccacaggaaggaattgctgatgctgcttctgaagtgaagtgttgctggggtaacactcacgaaaaaagcaggcagacaggaagcaaaagtcccttctcctggaggtgaccagcccccgtggaaggggttccgggatgcagaactttcagtgctaaaaatgggaaagatctggggaaagtgggacgagttgattaccctacttctgcagtctcctagcaaactgtcttgccagagcctaacatagaaccatctggcaaagcagaaatgtggcttgcttgtcccagcatcacaaagcagggcacaggatggtgcgtttggagctcagagacagtaactctgtaattgatactttttttttttttttttaaacagagtctcactctgtcgcccaggctggagtgcagtggtgcgatcttggctcactgcaacctctgcctcctgggtccaagcgattctcccagcctcccgagtaactggggccacaggcaagcaccaccacgcctgactaattttgtatttttagtagagacggggtttcaccatgttggccaggctggtctcgaactcctgacctcaggtgatccacctccctcagccccccaaagtgctggaattacaggcatgagccacctggcccagcctgatactgactgtttatgatcttcctggtcctctccaatccgtcctctgggctgccattgagaggagctttataagtagataaaattgatcatttcagactcttgccaaaagttttccatagttacctaccagccaaccagggtgaaatttcaactttttaatgaggtataaaatgttcctcaaagttatcctcagttacagcccagttttatctcctctcctgaacttgacattccagaaatatataaatctttgaatttttaaaaaataaatcatattctccattttctatgcttttaatacactagtccctcatccggataaaaagaagattagacgggggcagtagctcacacctgtaatcccagcactttgggaggccaaggtgggcagatcacctgaggtcaggagttagagatcagcctggccaacatggtaaaactccatctctactaaaaatacaaaaattagccagacagagtggtgtgaacctgtaatcccagctacttgggaggctgaggcacgagaatcactggaacctgggagacagaggttgcagtgagccaagatcatgctgttgcactccagcctgggcgacagagggagactctgtctcaaaccaaaaaaaaaaaagcatattaagcccccctttttagagatagagttttggtctgtcacccacgctggagtgcagtggcgcgatcacagctggctgacgcctcaacttcctggactcaagctatcctcccacctcagtctcctaagtagctggggctacaggcccacaccaccatggccagctaatttttttttttttttttttttttggagagagggtcttgccctgtttctcaggctggtcttgaactcttggcctcaggtaatccttccacctcagcctcccaaagtgctgggattacaggcatgagccactgtccgcccagccaaaccccttttttagaagaaaacatcagatcaaaagatgtgcttccactttaagaatggaagttaacttctgatcagctcaatgttagctggatttgaaggccaaagaaaattgaagcaaatgtatttttgaattacatagtatttactgttctcacgcttctgacacccaaggagaagaaagataacgctcccagtgctaatgaaacttgctaggttttctttcctgctaaagatatttatacttgaattcttttattttttaattttttagaagcagggtctcactgtatcacccaggctggaatgcagtagcttgggcagatctcactgtaaccttgaactccagggctcaagtgatcctccaacctcggtgttgagattacaggtgtgagtcactgaacccggccttaaattcattttaaggcttggaacagctttagattaattccataaatgaaaaagctgtggttgatttgaaaattagagatggtttataaaataatatcaggggatataaatgattctgcaatcatttaccaagcttttccttaaattcaaaggctaataagcttgcaaggttatctggttaaaagggtgattttgctttttgttttttttttgttgagacagagtctcactatgtcacccaggctcccgagtgcaatggttccatcatagatcactgtagcctcaacctcccgggatcaagcgaccctcccatctcagcctcctgagtagctgggaccataaatgcctgctaccacatttggctaattttttttttttaattttctgtagagatgtggtctcactatgttgccaaggctagtcttgaaaccctgggctcaagtgatcctccccacttggcctccaaaagtcctaggattacaggcataagccactgtgcccagcctgactttgctttccccactccccaccctttctactgcaacattttttcttttcaaatcaggtgatttctgacaggtcttcttcagtttttctccagcatgaattcctttgtgaagacttctgaggcaaactctaggctgtgtgggatcctattgaattcagtacctcccttccatgagctcgatggtaaatgtttactcaactgtctttccaccatgctaaaccttctgttgggcagaaactgtggctttccatcttcagattccacattttgagcacaatatcttccctatagtagacactcatcctacccttgttgaatacatgtaaaatgacttttgatgaaaccaaatttacatagagagaagggtggccacagggattcagggggaaggagggacatgggaagatattggtcaaaggatacaaacttgcagctataggatgaataggttctgcagacctcatgtaaaacttggtgactgactgtagttaacaatactgtattatatactggaaatttgctaacagagtaggccttacatattttcaccacacacataaacaggtgactgtatggggtgatgaatgtgtcaattagtttgattgtgatcatcatttcacaatgtattttaaaaatcatattgtaggttaggcacaatgactcacacttataatcccagcaatttgggaagccaaggtgggaggattgcttgagcccaggagttcaagatcagcctgggcaacacaatgagaccccatttccacaaaaaaagaaatttaaaaattgacaggatatggtggtgcacgcctagagtcccagctatttggaaggctgaggcgggaggatcactttgagcctgggagtttgaggctgcagtaaagtcgtgatcacaccactgcactccagcctgggctacagagatcgatcctgtctcatttaaaaaagaaagaaagaaaaaaaaaaaggctgggcgtggtggctcatgcctgtaatcccagcactttgggaggccgagacgggtggatcacgaggtcaggagtttgagaccagcctggccaacatagtgaaactccatctctactaaaaatacaaaagttggccaggcatggtggcgcacctgtagtcccagctactcgggaggctgaggcaggagaattgcttgaacctgggaggcggaggttgcagtgagccgagatcacgccattgtactccagcctgggcaacagagcgagacgccatctcaaaaaagaaagaaagaaatcaccttgtatatcttaagtatatacaatttttatttttaagttatgctttaataaagctgggaggaaaaaagatgttcaaatgcagccccagccaattcttattcaactttggccaagtttaggatgatctgagtttccgctgaatagcagagcagaagctatggcgtgttgtggctacaagtgagcgcgctggtgtcaagctgcttggtgagatagctgctggctgtttggccttgggaaagagattgagctcaccaggcctgaattcttttcctacagaagaatgatgttgacaacagtgcctcattcattgcatggaggattaactgaggcagtgaatgttcagtccagagtacagagctggagattttagacagaactgaaatattaggtgggctgggggcagtggctcacacctgcaatcccagcacgttgggaagcagagatggatcacttgagcccaggagttcgagaccagtctgagcaacatagtaagaccccatctctacaaaaaatcaaattaaattaaaaatcagctaggtgtgtgtgggtggggggagcacacctgtagtctcagctacctgggaggctgaggtagaaagatcgtttgagcccaggagttgaagactacagtgagctatgattgcaccactgcactccagcctggaagacagaacaagaccctgtatctaaaaataaaactttttgctgggtgcggtggctcatgcctgtaatcccagcactttgggaggccgagacagcagatcacctgaggtcagatgttcaagaccagcctgaccaacatggagaaaccccatctccattaaaaatacaaaataagctgggcatggtggcgcatgcctgtaatcccagctactcgggaggctgaggcaggagaatcacttgaacccaggaggcggaggttgcagtgagccgagatcgtgccattgcactccagcctgagcaataagactagaactctgtctcaaagaaaaaaaaaatttttttttaaataataaataattgaaatgttagctgttagagttctattctttgaaatgtggtaaatggcacttaactcacagtgttggggttttttgttggttttttttttagacagggtctcgctcgctctgtcacccaggctggagtacactggtgcagtatcagctcactgaaacctccacctcccaggtttaagggattcttgtgcctcggcctcccaagtagctgggattacaggcctgagccaccatgcccagttgatttttgtattttctgtagagacggggtcttgccatgttgcccaggctggcctcaaattcctgggctcaaatgatcccctagcctcagcctcctgaagtgccaggattacaggcgtgagccaccgcgcccagctcatagtattgttttaaggttaaaaaggtgtaatagggccaggcatggtggcacacgcctgtaatcccagcactttcggaggccaaggcaggcggatcacctgatgtcaggagtttaagaccagtcaacatggcgaaacctcgtctccactaaaaacacaaaaattagccaggtgtgatggcaggtgcctgtaatcccaggtactcaggaggctgaggcatgagaatcgcttgaacccaggaggcggaggttgcagtgagccaagatcgcgccactgcactccagcctgggtgacacagcaagactctgtctcaaaaaaaaaaaaaaaagaaaagaaaagaagagaagcagaaggggaagggaaagggagagggaaagggaaagggagagggaaagggaaagggaaggaaaggaaaggagtaataggttcggtgactccagtgatctggcataaagcaagcctttgcctgggaagtccctcacttaatgcccctgattgcctcctttagctattccggggcagatccgtcttcccaaaatgcacctcactaagcagctagtgctgccagttcttgtgtgtcactcagagaatagggttttccccaaaggaaagaccactgattatgtcaagagagctacaagccactaagcaacaatgcctttcatctccctgactttggctatgagttgctgggaaagccagtgtaacattcccaggcctggggttgtaccacctgggaaggagctggtctatggagcagagtgctggccttgagcttcttagtaacaaatgccactcaaaggacatacaagacaaggtcagccctctggtttttcagacaactgcccaggcccgctggttgtagtcctacgtccccagtgacttttacaaagagtgcagctgcaaagccgtgccactctgcagggccacatctccacagtgaagcccagatcacactctggggccatggctcagtctgctcatttgggagaaacccaggactcccagggatctagcagtaacatggaccacagtgcctgtgagggcccagcatggtggctcatgcctataatcccagcactttgggaggctcaggcagaattgcttgagcctaggaggttgaggctgcagtgagctagaacggtgacactgaactccagcctgggcgacagagcaatactctgtcttaaaaaaaattttttaaataaattgctgataacacaattctcacctgaaatgctctctctttgtagattagtgtatagcctgaattttaccattaggaaaaagaggagaggtggcattgaagcatttgttactaagcagaatgaactgcatgtgcaaagattcagaggcgacatgtgtagcagatttaagaaactcccataaattcagtatgacaagcatgtcactgttctataattttttatttttattggcaaataaaaattgtatatattttacttgttaaattgagatataattcacgtactataaaactcgtcgttttgtttgttttttgtttggtaggtttttttgttgttgtttttgagacggagtccggctctgtcacccagctggagtgcaatggcgtgatctcagctcactgcaacttctgcctcccgggttcaggcgattctcctgcctcagcctcctgagtagctgggactacaggcgtgcaccaccaggcccggctaatttttggatttttggtagagacagggtttctccatgttggtcaggctgatcttgagctcctgacctcaagttattctcctgccttggcctcccaaaagtgctaggattacaggcgtgagccaccgtgcccggccaaaatttgccgttttgaagtctacaactcagtgggttttcatgtattcacaatgttgggtgaccatcaccactaactcaagcacattttcaccaccctgaagagaaactctgtacccatcagcagccacttcctgctttccctttcccccagcccctggcaaccaataacctactttatatctctatggatttgcctctctgaacattttatacaactggaaggatacatttgtcgtgtgtgtgtgtgtgtgtgtgtgtgtgtgtgtgtgtgtgtgtgtgtgtctgtgtgagagaggggagaggggagagggaaggggggagggggaggggggaggggggagagagagagatggtcttgctatgttgcccaggctggtctcaagagttcaggcctcaaacgatcctcccacttcagccacctgagtcgccgggattacaggcccatgccaccaagcccggctaatttttaaaaaattttttagagatatggtctcactacaacatttatcctttaatgtctggtttcattcgaggttcattcagatggccaaggctgctgtcactggggaccttcctgaagggacagcaaatatcatgaccaataatgcaatctgccataccttggcatgacaatactgtttccagatattgtcactatttcttctccatactattttttttttttgagacagggtcttgttctattgtccaggctgaagtgcagtggtacaatcttggttcattgcagcctcagccttctggactcaagcgatcctcccacctcagcctcctgagtagctgggactataggtgtgcaccacaaaacccggctaatttttctagtgttttgttgttattgttgtttgtagagatggggtttttgccatgttgcccaggctactcttagactcctgtgctcaagccatcctcctgcctcagctacccaaagtgctgggattacagaagtgagccactgcacctggcctatccatagtctttgttgttttttaaccctgtccctttgaggtttatgctattgagctgtactgcttccacttccccttagcaagcctcctagacagatctgttttggggctttttttttctttttttttttttttttttctttgacagagtcttgctctgttgccaccctggaatgcagtggcatgatcttggttcacttcaacctccgcctcccgggttcaagtgattctcctgcctcagccttccaagtagctgggactataggtgcacaccaccatgcccagcttatttttgtatttttagtagagacggggtttcaccatgttggccaggctggtcttgaactcccgacctcgtgatccacctgcctcagcctcccaaagtgcatgctgggattacaggctgagtcaccgcacccggcctttttttttttttttttttcttagagacaaggtcttgcttgattgcccaggctggagtgcagtggtgtaattacggctcactgcaggcttgaactcctgggctcaagcagttctcccatctcagccccacaagtggctgggactactggtgcgcaccaccacaccaggctaactttataaattattattattattattattgtagagactaggtctcacctttttttttttcccccccagaaacaagatcttgctctgttgtccaagctgtagagttgtggtgccatgatagctcactgcagcctcaatctcctgcgctcaagtgatcctccctccttggcctcctgagtagctggaactaaaggcacatgccaccacacctggctaatttttatgttttgtagggatgaagtctcgcatgttgcccaggctggtctcaaacttgaactcccagcctcaaacaatcccctctccccaccaaagcctcccaaagtgctgagatttcaggtgtgagccaacgcgctgggccaggtcctcttctcccttgctctccacggtctacttggaaatctgagagtcggctgcgtgcaatggctcatgcctgcaatcccagcactttgggaggccaaggtgggcagatcacctgaggtcaggagttcgagaccggtctggccaacatggcgaaaccccgtgtctactaaaaatacaaaaattcgccgggcatggtgggtgagcacctgtagtcccagctgcttgggaggctgaggcaggagaattgcttgaacccgggagtcagaggttgccgtgagctgagatcacgccattgtactccagcctgggtgacagagcaagacttggtctcaaaaaaaaaaaaaaaaaagaaaagaaaaaaagaaaagaaaacaaacaaaaaaaagaaatccgagagtcatccttcactcctccctcttccttactcccatagcagacctcttggaatatcctggaagttctaagcctgtcacttctcagtccccacagaagtcacactctcccaagccaccatcatctctggcttgaattactgctgcaggagccttccaagtctggctcctacaattaattcatgatccacccaacaagcacagaacgtcaagtcactcctctcttaaaatcccccatagcttcccgttttcccttaggaagagtctaaaacccttaactttttctagaaggttcctccaggaggtctctacttgctgtctcagcctcggactctctgtgcttcttcagcgtcctgtgctggcactcaattactttaggggtttcatgacacggttctctccctcccactccttttcatccttagggtcttagcttgctccccgaggcctccccacccagtagttctcagtccccgtgtgcccacagcgccctctactgccccttcccaaacacgcagcatgggtgtgtttgcccagcgcctctctgcacacccagacttcaagctgcaagatggcaagcactgcctcctccactgctaagtacctggcaaagcaattgtagtcagtaaattttttttcccattttttttaattttttttttttttttttaggtaaagaaaggcatttattaggtctgggcatggtggctcatacctgtaatcccagcactttgggaggccaaggccagtggatcacttgaggtcaggtgttcaagaccagcctggccaacatggtgaaaccccatctccactaaaaatacaaaaattagctaggggtggtggtgcatggctgtaatcctagcttctctggaggctgaggagggagaatcgcgtgaacccaggaggcagaggctgtagtgagccgagatcgcgccactgcattccagcctgggcgatggagggagactctatctcaaaaaaagaaaaaagaaaagaaaggcatttattagagaaggcatgaaaatacgttgcaagagtgcaacaggcagcactgcagagaaggggctgtctcctctcagtaaatatttttttcaattaaagaatgagtttatcatacaagaagcctggagaaaagaaatggtaaaggttgtgaaagttgtcagagtcaaaatggagtcaccaggcctggcacggtggctcaagcctgtaatccctacactctgggatgccgaggagggcatattgagttcaggagttcgagaccagcctgggcaacatagtaaaagcctgtctctactaaaaatacaattagcctagtgtggtggtgcgtgcctgtaatcccagtttctcaggaggctgaggtgggagaatcacctgagcctgggaggttgaggctgcagtgagctgagatcatactgctgcacattccagcttgggagacagagcaagaccctgtctcaaaaaagaatggaactgaaaaaaataaataaataaaccctgacacgggagttcaagaacaccctggacaacatagcaagaccctgtccccctcccccccaaaagaagatgaagaaaattagttggatgtggtagcacacacctgtagtctcagttcaaggctgcagtgagctatgatctggcccctgcactccagcctgggtgacagagcaagactctgtttataaaaaaaaaattataaaaatttttaaaaaagaaaaccctgacagatagagatggggaaggccatgaagagaagattctcagggttgggtgcctgatcacaaaaactattacaaaagactccaactctgcaaaacccacaaccttgcatacaccaaaaatacttctgcaagaacatcttcccagcaattgcctatccaacttcaaactggcatcatacccgttactgatctttgtagccaagaataattatctcaaaacaattatgtactgctcctcattttttgtttaaaaacctttgacaggccgggagtggtggctaaagcctgtaatcccagcactttgggaggccaaggcgggcagatcactgaggttgggagttcaagaccagcctgaccaacatggagaaaccccgcctctactaaaaatacaaaattagccgggtgtggtggcgcatgcctgtaatcccagctactcgggaggctgaggcaggagaatcgcttgaacgtgggaggcaggggctgcagtgagctgagatcgcgccactgcagactccagcctgggccacaagagcaaaactccgtctcaaaaaacaaaacaaaacaaaacaaaaaaagctttgtctccctttgcctcccggaatatacacagagtttactgtgacaactgcattcctattgcaatgctctgttcctgagtaaatacctttttcttttagaaaagctctgttatttaggttcacatgattaatagatgcaatggttaatgattactagataattaatattaatggatgattaataattgagtaatagatgtcatggataataattatgaattatgattaaattagcttcctgaatgtattagtctacttgggttgctgtaacaaaatacctttgactggataatttataaataatagaaatttggctggatctggtagtgtatgcctgtaatcccagcactttcggaggccaaagcagaaggattgcttgaggctgggagttcgagaccagcctgggcaacatagcaagactccatctctacaaataaaacattttttaacactttggaaggccgaggcaggcagatcacgaggtgagggaccgagaccatcatggccaacatggtgaaaccccgtctctactacaaatacaaaaaaaattagctgggcgtggtggtgcatgcctgtcatcccagctacttgggaggctgaggcaggagaatcgcttaaacccgggagacagaagttgcagtgggccgagattgcgccactgcactccagcctgacgacagagcaagactccactctcaaaaaaaaaaaaaaaaaaaaaaaattaaattagccagccatggtggcatgagcctgtggtcccagctactggggaggctgaggcaggaagatcacctgaacccagaagattgaggctacagtgagccgtgatcataccagcacactctagcctgggtgacaaagtgagaccctgtctcaataaaaataaaaaaaaatcatagagcctggtgtggtggctcacgcttgtaatctcagcactttgggagaccgaggcgggtggaacacttgaggccaggagttcgatatcagcctggcaaacatggtgaaacttcatctctaccaaaaaacaaaatatatatatatatatatacacacacacacacacacaaagtagccaggcgtggtggcatgcacctgtagtcccagctacttggaaggctgaggcatgagaaccctttgaacccaggagggagaggttgcagtgagccgagactgcgccactgtgctccagcctgtgtggcagtgagaccgtcaaaaaaaaaaaaaaaaagcaaaaaataaaaagactaggaatttattgcttacagttctggagactgggaaatccaagatcaaggtgcccgcagatttgggatctaatgaacacccattccctgtaaatggcactttctatgtatcttcacctggcgaaagaaaacgacagctctctggagcccctttctaagggcattattcccattcacgagggcagagccctcatgacaccatcaccttctaacaccatcaccttctaataccatcaccttggttctctggtttcaacaggggaattttggagggtcacaaatattcaggccataccactggcttataaagagaagcagaacagggctggaagcccagacacccacgcccacccctgaattaccattagttctcaactcacctgacatcattccctttcagtgtttcctatgttttttttttttttttaaagacagggtctcgccatatggcccaggctggtcttgaactcctgggctcaagtgatcctcctgtgtcccgaattggtgggttcctggtctcactgacttcaagaatgaaactgcggaccctcgcggtgagtgttacagctcttaaggtggcgcgtctggagtttgttccttctgatgttcggatgtgttcggagttttttccttctggtgggttcgtggtgtcgctggctcagaagtgaagctgcagaccttggtggtgagtgttacagctcttaaggcggcgcatctggagttgtttgttcctcccagtgggctcgtggtctcactggcttcaggagtgaagctacagaccttcgcggtgagtatcacagctcataaaagcagtgtggacccaaagaatgaccagtagcaagatttattgcaaagagcaaaagaacaaagccgccacgtcgtggaaagggaccccagccagctgccactgctagttcgggcagcctgcttttattctcttatctggccccacccatgtcctgctgattggtagagccaagtggtctgttttgacagggcactgattggtgcgtttacaatccctgagctagacacaaaggttctccacgtccccatcagattagttagatacagagtatccacacaaagttctccaacgccccaccagagtagctagatacagagtgttgattggtgcattcacaaaccctgagctagacacagggtgctgattggtgtatttacaaaccttgagctagacacagagtgcccattggtgtatttacaatccctgagctagacataaaggttcacatccccaccagcctcaggagcccaactggcttcacccagtggatcccgcactggggctgcaggtggagctgcctgccagtcccgcgccatgcactcgcactcctcagcccttgggtggtcgatgggactaggcaccgtggagcagggggcggcgctcatccgggaggctcgggccgcacaggagcccaccgagggggtgggaggctcaggcacggcgggccgcaggtcccgagccctgccccgcgggaaggcagctaaggcccggcgagaaatcgagcacagcgccggtgggctggcactgctgggggacccagtacaccctccgcagccgctggcccaggcgctaagcccctcattgcccggggccggcagggcctgccggctgctccaagtgcggggcccgccaagcccacgcccacccggaactccagctggcccgcaagcgccgcgcgcagcccgggttcccgctctcgcctcgccctccacacttccctgcaagctgagggagccggctcccgccttggccagcccagaaaggggctcccacagtgcggcggtgggctgaagggctcctcaagtgccgccagagtgggagcccaggcagaggaggcgcggagagcgagcgagggctgtgagaactgccagcacgctgttacctctcactcctgccttggcctccctaagtgctgtgattacaggcatgagccaccacacctggccccttctatgcctctagacctcatgaaatgcccttccgtgctatgcctgttgaaagaaagccagtttctcgcttgagagagtgtgtcccttcctctgccctccctaactcctgttgtctcgcctctcccacagtcctcctgggtgcatccccgagtcctttccttttacccaccctgagactcccacagctctctcagtggagtcctccgcagaagtctggagcctcaccaggatgttgcctgtccccgagctcatttctgagtagaaggatttgaaaccctcagaaatgacaccctgaaaaaagaaacagaatgctgcacccgtgagacacatcccaggcctgggcttgttaggtctgtctgccaaaccaggctgtgctttgggtgtgaggtggacagctttgcaaagcccactcccccgtgtcaaatcgtagttcctccctctgggctaaaaagggagtggtctgaaattaaggcactggaggctgtgtttgtctgcgcaggctgccatagcaaagtgccacagactgggtggcttaaacaacagaaatttattttcttacaatgctgaaggcttggaagtctaagatcaaggtgttggcaggtttgatttcttctgaggcctctctccctggcttgcagtccgccgcctactcactgtgtcctcacatgttctgttatctatgcatacacatcccttctgtctctctgtgtctaaatttcctcttcttggccaggcatggtggctcaggcctgtaatcccagcattttgggaggcagcatttgggaggaccacttgaggccaggagttcaagaccagcctgggcaacatagtgagaccctgtctatactaaaaatacaaaaattagccagttgtggtggcacatgcctgtagtcccagctactcaggaggccgaggcacgagaattgcttgaacacaggaggtggaggtcacagtgagccgagattgcgccactgcactccagcctgggcgacagagtgagactctgactcaaaattaattaattaattaaagacatcagtcagtttggaattggacccagcctcatgaccctattttaactttatcacgtctttaacagccctatttctaaatacagtcacattctgcggtactgggggttagggcttccacatatgaatttgggggagggggaacataagtcagccataacagagacagtccttggttttaggatattaccaatccttcagggttctctgaataagagcaataaccagtggaagaataagtaaataagtgtcatgtctgaaagctagagacaggatacaattaatttttaaatgaataggtacaggctgggtgtggtggctcacacctgtaagcctagcagtttgggaggccgaggccaggaggatcacttgagctcaggagtttgataccagcctgggcaacacagtgagaccttgtctctataaagaaaaaaatttttttgaccaggcacagtggctcctgcctgtaatcctagcactttgtgaggccaaggcaggcggatcacctggggtcaggagttcgagaccagcctggccaacatggcaaaaccccgtctctactaaaaatacaaaaattagccaggcgtggtggcacaggcctgtaatcccagctactcaggaggctgaggcaagagaatcacttgaaccagggaggcagaggttgcagtgagccaaagttgcagtgagccgaggtcgcgccattgcactccagcctgggcaacagaatgagactctatctcaaaaaaattttttttaattaaaaaaaaaagaatacatatgaataattgtatgtcagctagctttttctttctttctttcagatggagtttcactcttgttgcccaggctggagtgcaatggcgtaacctcagctcactgcaacctctgcctcctgggttcaagtgattctcctgcctcagcctccggagtagctgggattaaaggcacccaccaccacacccagctaattttttgtatttttagtagagacagagtttccccatgttggccaggctggtctcgaactcctgacctcaggtgatccacctgcttcggtctcctaaagtgctgggattacaggcgcgagccaccacacccaaccaactagctttttaactcaatgaaagagagcagaggaggcctggggtccacacatctgggtccttcgcctggttgtgccactgttaaaggagagacagtacgatttaaagagactggaagataaataaaaaggaaggttccaaattgcaggaattagtatctccaaacagcctcaatccttttggaactgggaagcaggcctgaaggactgaatgataaaattagtagtaactcagtataaagcagaatatttctttccaactctgaggactgtggtgcacatttgatggaaagatgggaagaaaatcaaatgcactaaacttgttccaggggcaagcacagcaaagtatctgccaagaaggggggatcccaaagagaaaatttatcagcctcagttttgcgtggggttagccttgttcacaaggaatcccaggtatcctgccaatagcatgggatacattgttatgggacagataatgctaagtacatagtatcagcatgaagatctagagaatatcttcatacattacatggcaggtttgattgtgaaatttttattttgtttcgttttattttattttattactttgagacagggtctcactctgtcgcccaggctggtgtgcagtggcgcaatcacagctcattgcattctccacctcccaagttcaagtgattcgcctgcctcagcctcctgagcagctgggacaacagtcgtgcgccaccacgcctggctaattttttgtattttttgtaaagacagtgtttcatcatgttacccaggctgctctcaaactcctgggctcaaacaatccacccaccttggtctcctaaagtgctgggattactggtgtgagccatcacaccctgctgattatgaagtttaaaaagttaagtcctggccgggcgcagtggctcatgcctgtaatcctagcactttgggaggccaaggcaggtggatcacttgaggtcaggagtttgagaccagcctgaccaacatggtgaaacgccatctctactaaaaacacacaaaaaattagccaggagtggtggtgtgcacctgtagtcccagctactcgggaggctgaggcaggagaatcgcttgaatccaggaggtggaggtcgcagcgagccaagattgcgccactgtactccagcctgggtgatagagcaagattccgtctcaaaaaaaaaaaaaaaaaaaaaaaaaaaaagttaagccctctgtatcacgtgagtttgtatgcttgggtagaggtacagctctccattgttcctgggcacacagtaagactaaatgaagggagttttgactgggaagcgtgtgttttccattgacatgttcccaggcatgtgtggacatggctggcgtgggcctcaggagtaaggcaaggggaattcaggatttcctctctccatgacacatgacagcttaggtcacgttcaagttcctttgttatatgctctcatacaattgcattcctctccttctgtcttagtccattcaggctccttatagcaaaatgccataaactggatggcttataaacaacaaatattggctgggtactgtagctcatgcctctaattccaacactttgggaggccgaggtgggtggatcacaaggtcaggagtttgagaccagcttgacaaacatggtgaaaccctgcctctactgaaaatacaaaaaattagctgggcatggtggcgcatgcttgtaatcccagctactcaggaggctgacacaggagaatcgcttgaacccaggagctggaggttgcagggagctgagatcacacccttgcactccagcctgggcaacaagagcaaaactccgtctcaaaaaaacaaaagaaagaaaaggaaggaaggaaggaaaaatatttattttccacattttctagaagctgtgaagtccaagatcatggcacagacagattcggtgtctatcgagggcccatttcctagatggtgccctctcactgtgtcctcacatagtagaagagacaaacaagctctcttgggcttattttatataagcactaatcccagcctgagcgctccaccctcatcactaatcacctccccaaaggcctcagcttctttttttattattattttttaagcgatgaggtctcactcgttcacccaggctggagtgcagtggcaccatcacagctcactacagccttgacctcccaggctcaagtgatcctctcacctcagccacccaagtagcttggactacaggcatgcaccaccatgcccagctgatttttttattttcttgtggagacagggtctctctaggttacccaggctggtctcaaactcctgggctcaagtgatcctcccaccttggcctcccaaagtgctgggtttacaggcataagccacggtgctcaaccatattaacattcttgcttgtgtgatggatgctatcactgacgaaaccctcccaggtctctggtagtgccatgaatttctaatattttcagactcaaagaaatgcccagagttcaaagaagaacaccagaacctcatttgaactcacctgcctgtccctagtgaggggcagtcatctcaaatacaactgacaatcaagttcaaatctgacacttttatcatagatttatgagctagctggtcccaggtgtgcatggcccacttctccttgtccatgatcaagacaatttgcttggtatttgctttttatttttattttttgagatagagtcttggtctgtcgcccaggctggagtgcagtggtgcggtctaggctcactgcaacaaaacctccacctcccaggttaaagcaattctctgcctcagcttcccaagttgcttggattacaggtgcctaccaccatgcctggctcattttttctatttttagtagagacagggtttcaccatcttggccaggctggtcctgaactcctgacctcatgatccacctacctcagcctcccaaagtgctgggattatagccgtgagccaccgcacccggcctgctttttatttttctaccaaagacttctgtcctcggttttcttctccctccagcccttctgacccagctggccacagaccatgatagataaagtgcagaagtcctcgctgccaagctgcttctcccttgtgactatgtccatgctaagtatttctgtcttagaatagagctacaagaattatagaggctgaagactctcattaacaaacagccctttgcatttgacaaggtgttacagaagaagaaagaagtgaattttttttttttttttgagacagagtctggccctgtcacccaggctggagtgcagtggcacaatctcggctcactgtgacctccacctcccaggctcaagccatcctcccacctcagcctcccgagtagctgggactacaggcacatgccaccatcacacccagctaatttttgtattttttgtagagatggggttttgccatgtctgatctgcccaggctggtcttgaactcctggactcaagcaatgcacctgcctaggcctcccaaagtgctaggattacaggtgtgagtcactgcgcctggccagaagtgagtattcttgatagcctcaggaaatgaaagatatattactgggcccatactcagctcgtggcaaagccacctccatcaactgcccccattccagctggctggctgtgaaattgcctttgcaaaaattgtgacagtgaaagaaatatcacgtaactgactccatcttgcttctaagctcacagctgtctttgctcattcctgcacataggccaagccaactatatgaggactttagtttatagttaactttaaaacaaagcaagccaggcatggtggctcatgcctataatcccagcactttgggaggccgaggtaggtggatcacttgaggtcaggagttcgagaccagcctggccagcatggtgaaaccccgtctctactaaaaaaatacaacaatttgccaggcgtggtggcacacgcctgtaatcccagctactttggaggctgaggcaagagaatcacttgaacccaggagacagaggttgcagtgagccaagatcacaccactgcactccagcctgggcaacacagcaagactccatctcaaaaaaataaaaataaaaaataaaacgaataaaataaagctgataacagtcccttcctgaaactaacccccttcttgctcagggactgactgacactgcctttgtataactaatgaaagacctcaaggttagaattgtggtaggggcctgaattctgctaagatgaaggcatagttaaactctaacagccattgtttcttctaagatgtggatatagttaaactctaacaagtcattgttttataacttgcctttttttgtaactgcttattactcagaaatcatatagccaatggtcacaagatttataacttccccaattcccccatggacaacatcactattgtacagtcaaagactggtatttgagacattttccagaccttgcattccgtatggaccaactggcgccacctggaccagcaactgacacccaggagctgacttagcacagaagacagtttcgatcccctatgatttcattcctgacccaaccactcagcattcctcattccctagtcccctgcttgccaaactatccttgaaaaaccctagcctccaaattcttggggatgtggatttgagaaatatctcctgttcttctcacttgactggccctgtgattattaaactttctctgctgtaactcctgctgttcttggtgtcttggcttttctgggcagcaggcaagaagaaccagttgggtgattacagcaaggatggatttcttgctcagttatgagatccttctttgtagcaggccattatccccattatcagccatccttgactgcttttgtccagaagcacacctcgcaacttgtctgaagtgcaacctacacccaccccagtaggaattgccctgggacatgactgagctcttcaggcccacggcagtgtcaactgtgagtcatgtaaaggagaaatgtcaaagaaaaaaaatgagacaaaaaatagagccaaggaagactctggggatcttccaggttgtacaaaccaaaataggtttttgtttgtttgtttgtttttgtttgtttatttgtttttttgagacagagtcttgctctgtcgcccaggcaggagtgcagtggcacaatctcggctcactgccagctctgcctcccgggttcacaccattctcctgcctcagcctctggagtagctgggactacaggcacccgccaccacgcctggctaattttttttttgtatttttagtagagacagggtttcaccgtgttagccaggatggtctcgatctcctgacctcgtgatccgcccgtcttggcctcccaaagtgctgggattacaggcttgagccactgctcctggcccaaaataggtttgggggaaggaaagagagtgaaggaattacaaacagatccatcaacaccctccttatcctcaaagtttactgtttttgttttattttgttttgttttgagacagggtcttattctgtcacccaggccagagtgcagtggcgtgatcatggctcactacaacctcaacctcccgggctcaagtgattctcccacctcagcctcccaagtagctgggactacagggcatccaccatcatgcccagctgattttttaaaatttttttgtagagatggggtctcacaatgttgctcaggctggtctcaaacacttgggctcaagcaatcctcctgtcttggcctcccagagtgccagggttacaggcatgagacactatccctggcttactgtgttttaaagaagccaaagaagtacttcagtgccctgacatgatctttgctgacagtcagatctccaggcacgttcaaaggcgatttgtcatataatgatacatccatttcaatccactggtccaggagctgcctttggggcattaggacagctgggcctcacaagccacttctgttctagcccactcctcagggcagttgacagaacacaatgagaatgttccagcaaagaagtgtatacctaaaggtgagtcacaggtactcaaaagaaagcaatactggtatgcacaaaatgaaaagcttcccggtagatattcccataccagcttcttttttgccccatcctctggcttctaacggcctcttgcatctttccttggccaattcttttctctctccatgtttattgtctcacctctcttcctctcaaccccagtccttattctcatcttctgcttcagattcctgtcttctttctttctttttttttttttttttttgagatggagtttcgcttttgttggccaggttggagtgcagtgctgcaatgttggctcaccgcaacctctgcctcccaggttcaagcgattctcctgcctcagtctcccaagtagctgggattacaggcatgtgccaccacgcccagctaattttgtatttttagtagagatggggtttctccatgttggccaggctggtctcaaactcccgacctcaggtggtctgcccgcctcagcctccgaaagtgctgggattacaggcttgagccactgcgcccggccaattcctgtctgttttcaagaaaaaggatccattcccttcttgatcgtcatgtccatcttgactcttgcatgatcaacaccctctgtcctaccctgcaatcaccctacctcttcctcctcacatttattgtccctcagtgacaaatttctcccctgttctttgcttttcaaaagcaagaactaagacaaattttgaggccaggggcagtggctcatgcttgtaattccagcactttgcgaggctgctgtgagagaatcgcttgaggctgagttcaagatcagcctgagcaacagagtgagaccccgtctccacaacaacaacaaaaaagacagaacagccaggcgtgatggcatgcacctgtggtcccagctattcgggaagctaagatgggaggatcacttgagcctggggaggttggggctgcagtgagccatgatcatgcaactgagctctagcctgggcgctctagcctgcctccaaaaaaaaaaaaaaaaattaaacttcgagattatggagagcttcctgattgttaaatatatcctcagacggggatggtggtgcactccaactctatgccgatagaagctcctgtacttacaacccttccagacctcatcctatgcacctcttcatctgttcccttgtaccctttatattaaactggtaaacataagtaaagtgtcttcctgagttctgtgagctgttctagaaaattatcgaacattatgagggaggcatgcaaaccccccgatttatagctggttggtcaaccaaaagagtcaaactctgtaaaatatttgaagagatttattctgagccaaatacgagtgaccatgacccataacacaaccccaagagatcctgggaacacatgcccaaggtcattggggcacagcttgcttttatacattttagggaaacatgagacatcaaccaacacgtgtaagatatacactggtttggtctggaaaggtgggacaactgaaagcaaggcagtggggtggaagggaggggaggtggggattccaggtcatggatggattcaaagattttctgattggcagttggttgaaagagtttaactaaagacctggagtcaatagaaaggagtatctgagttaggataagggaccaagttctttttttttttttttttttttttttgagacagggtctcactctgttgcccacgctggagtggagtggcccaatcttggctcactgcaacctccgcttcctgggtccaagtgattctcatgcctcagcctccctgtaactgggattacaggtgcgtgccactgcaagaaattttactatctattctctctgaagcctgctacctggaggcttcatctccataagaagaaccttggtctcggctgggtgcagtggcttatgcctgttaatcccagcactttgggaggctgaagcgggtggatcacctgaggtcaagagttggagactagcctggtcaacatggtgaaaccccgtctgtactaaaaatataaaaatcagcagctgggagtggtggctgcctgtagtcccagctactcaggaggctaaggcaggagaattgcttgaacctgggaggtggaggttgcagtgagccaaaatcatgccactgcactccagcctgggcacagagtgagactctgtctcaaaaaaaaaaaaaagaattttatttttggtttacattggtcagaagtatgggagtcctgggacttgcaactggcatctgaagttggtgggtggggcagttttgagcccttcagctgtggaatctgccctaactccaggtagtatcagaattgaactgaattgttgaatatccagttggtggccagagaatcagagaactggctgttggtgttggaaaacatcccaggagtccttgaagtaggagaacagagaaccaaaaagagcatgagaaccagagacagagtaaaaaggattcaaagatgagctgttctggagtttacccccttacacactcatcacctatggacaacccacctttcaatagacttggatccttataggctccctgaatggaggctggatgaattggacaccttgtgtggataaagcatgaaagaacttccacgtaaaacaagatggaaccaaacagacacaattggaaacatccctatgggcaccaatggacctacctgcactgtcccttaggtatggagtcagcaaattccactgcagtatcccaagagtgaacagggtttagcaggagatcctttcacagagaagaatccttctaggaagtgcccactgaaacatccagttaatctaagatttaggcactgagaatggagcacagaaatttttttttttttttttttgagacaggacctcactctgaagcccatactggagtgtagtggtacttacatggctcactgcagcctcaacctcctgggctcaagcaatcctcccatctcagcctcctgagtagctgagaccacagatatgtaccaccacacccaataatttgtctgatttttagtagggacagaatctcaccatgttacccaggctggtctcaaacccctgggcccaagcgatcctcctgcctcagcctcccaaagtgctggccttataggcgtgagtcactgtgcctggctgcaaattcttatatcaagacttcatccttctttctgtttataaatatctggaagttccatggagctataccagatgtcaggaagggcctcattcagagtctcatctcttgtttttcatggtaattaaaatcttaaggttggccgggcaaggtggctcacacctgtaatcccagcactttgggaggcttaggcaggcagatcacaaggtcaggggatcgagaccatcctggctaacagggtgaaaccccatctctactaaaaatataaaaaattagccaggcgtggtggcgggcacctgtagtcctagctactcgggaggctgaggcaggagattggcatgaacctgggaggcggagcttgctgtgagccgagatcgtgccactgcactccagcctgggcaacagaggtcaggctggctcaaaaaaaaaaaaattagccaggcgtggtggcgggcacttgtaatcccagtttcttgggaggctgaggcaggagaattgcttgaacccaggaggcagaggttgcagtgagccaagatgatgccatttcactccagcctgggtgagagacagagactctgtctcaaaaaaaaaaaaaaaaaaaattaaagagaatagcttcctgttggtccccagcccagagccaagcagctctgtgagtgacattaagctggatgaagatgacatagcagagcaaatggcaatgctatcttctaaccagaattgtcagtaatttacctccagccctgccaaagcccaggaggaggcttaattgaggaagggatatttgcaggccacaaatcaaaatgacataaataattatgaaaaacaggctgggcacagtggctcacgcctataatcccagaactttgggaggctgaggtggagagatcacttgaggtcaggagttcaagaccagcctggccaacatgtattttttgtagagatgaggtctcactatgttgcccaggttgatcgccaaatactggcctcaagcaatccacccacctcccacagcattgagattgtaggtgagagcccctgccccggcctcaaatttccccttttcataaggacacctgtcatattggagtagggacccaccttactccagtatcacctcatcttaactacacctgcaacaaccctatttccaaatacagtcagaggcactgggagttggcacttcaacatgtgaatctggggggtggggtacccacaccaggctcatagacaaataggtttcaaaatatgtagataattttcaattaatctgaagaccgtcaaagagaaaaattctaacagctttcagaaactaaacaacaccagacttgtcagcagcaacaacagatgcaagaagacaatggggtagtattttgttcaaagaataaaaggaaaacacttggaacttagagaattttatgtctagcagaactgtcatttaaatgtgagggtacataaagatattttcagatataaaaaagtgtcaaaaatttatcccgggccagacgtagtggctcaatgcctgtaattccagcactttggaaagccaaggtgggcggatcatgaggtcaggagttcgtcaccagcctggccagcacagtgaaaccctgtctctaccaaaaatacaaaaaaaaaaaaaaaaaattagccgggtgtgatggcaggtgcctgcagtcccagctacttgggaggctgagtcaggagcatcacttgtacacgggaggtggaggttacagtgagccaagttcccaccactacactccagcctgagcaacacagtgagactctatctcaaaaaaaaaaaaaaagtttaccccacaaaaaccttcaaaaataatcctggaggaagtattacagcgagaagagaaacaacttatgagacacagcaaataatagtgactacatttctatgataaataaataatgcccccaaaaggcatatttatacaaatccaaaatcaaaagtctaaaaaatatcaatatggcagtttcagggcaaaaggaagcagaggggagaatttatggggtagaataaacacaaattagtctgagcatgttaggaataactactataactttttaaaatttttttaaattaaataattttcaaatcagaagtagaaaataatcaatgtattcatggaagcaaggaaaggagaaaaaaagagagtatggtaaataaaagactgaaaagagtccaaaaaaaaaagtcttttgttgttgttgctgtagagatgggatcttgatctgttgcccaggctggagtgcagtggctcagtcatagctcactgcaaacttgaccttctgggttcaagcaatcctcttacctcagcttcccaaggtgctgggattacaggcatgggccactgcacctagccaggaaaatgcatttaaacctgggctttcaagaatttccttagggctggccacggtggctcacacctataatcccaacattttgggaggccaaagtgggaagatcaggagttccagatcagcctggccaacatggtgaaaccttgtctctactaaaaatacaaaaattagctaggcgtggtggcaggctcctataatcccagctacttgggaggccgaggcaggagaatcgcttgaacccaggagggagatctcggttgcagtgagctgagattgtgccactgcactctagcctgggcaagatagcgagactccatctcaaaaaaaaaaattcctcatataaaatcccaaggaacataagttgatattttaaaaaatcactaacaggaaataaactacataagcagaagcaataagcctcagaatcagactcacaaatggcacagccactggaagtatgctgtacagaatataaaataaatacagtaaatctttaaagaaattaatggcagagctttaaaaatactgaaggaaaagctgattattaaaactgtcaaggaagatttgaagaggaaaaactaaaaattatataagtgaaaactttaaaacccagtgaacaaatgaaatcgattacagcacagctaaaaagaaaagaaactaggcacatattggaagaaattatacagggtgtggccaggcacagtggttcacacctgtaatcccagcactttgagagcctcaggcaggaggatgacttgagcccaggagttcgaggccagcctgggcaacatagcaagacctcgtctctactaaaaatttaaaaaattagccaggcgtggtggcgtgtacctgtggtctcagctactggagaggctgaggtgggaggatcgcttgagcctaggaggcagaggttgcagtgagccgagatcgcaccactgcactccagcctgggcaacagattgagaccctgtctcaaagtcaaaaaaaaaaaagaagaagaaaagagagagattgttagagatagtattagggaacctggcacttgtaaggagaaaagtaaagttagttccccacctctctccataatacaaaggtcaaataaatgggctagaaacctaaataaggaaggtaaaaccagaaggctaggactgtatgttaatttcctagggctgccataaagtaccacaaactgggtggcttaacccaacagaaatctattgtctccccattcctggaagccagcagtccaaactcaaggtgtcagcaaggccatgcccgctctgaaccctgcaggggaatccttcctcacctggtcttagcttctgatgatttattggcagcctttggagttgcttcgcttgtagctgcataactctaatctctgcctttgttgtcatatggcattccgtgtgtgtgtgtgtgtgtgtgtgtgtgtgtgtgtgtgtgtgtgtgtgtgtcctcacatggctatcttctttttatttatttatttatagagacggggtctcactgtgttgcccaggccgatcttgaactcctgggctcaagtgattctcccaccttggcctcccagagtgctgggattataggtgtgagccacggcgcccaaccaggctgtcttcttataaggacaacagtgatacggcattagcagcccaccctactctagtatgacctcatcttaactaattacatctgcaacgaccttgttttaaatacagtcacattctgaggtactgggagtaggaattcaacatatccttttggaagaacacaattcaacccataacagctgctagaaaaatgtagaatattgttatggctttggagtgagcaaagattcttcaacccagaaagcacatatggtgaaaatgtgacgggtttgactacatgaaatttaaagatttcttccaaacaaggacatcagaacatcattgaaaaaattaacacagctgggcgaggtggctcatgcctgtaatcctagcactttgggaggccaaggagggcggattacttgaggtcagaaatggcgcatgcctgtaatttcagcaccagcctggtcatcatggcgaaactcagtctatactgaaaatacaaaaattagctgggtgggcatagtagcttatgcctgtaatcccagctactagggaggctgaggcaggagaatcacttgaacccaggaggtggaggttgcagtgagccaagattgtgccactgcactccagcctgggcgacagagcgagactccatcttaaaaaaagattaaaaaataaaaagttgacttgatattagtcaagggatacaaaatatcagttatgcaagatgaataagttctagagatctaatgtacaatgacacgactatcgttaataagattttattgtatacttgaaatttgttataagggtaggtcttaagtgttctcaccacaaaaaaaaaaaaaagctccccaactcattgaatagggctagcattccgccaatgtcaaaactaggcaagaataacaccagaaaattccatttatgaaaacaaatgcaggccaggcacagtggctcatgcctgtaatcccagcaccttgggaggccaaggcaggtggattccttgaggccaggatttggagaccactccggccaacatggcaaaaccccatgtctactaaaaatgtaacaattagctgggcacagtggcatgcgcctatagtctcagctctggaggctgaggtgggagaatcgcttgaacccaggaggtgggtgagctgagatatcaccactgcactatagcctggatgacacagcaaggctgtctcaaaaaaaaaaaaaaaagaaaagaaaagaaaagaaatgcaaaacaaccctaaataaagtattattaaatcaaatccagcaatggtgaaagcaagaaagaggagataatcaacattaatggattaaaggcagaaaaaccatctgattgcataaataaatgcataaaaagcatttgataaaatgtaacacctgcatttaaaaaagaaagaaagaaagaaagaaagaaaaatctctagcaagttaggaatagaacctgataaaggacttctactagaaatctactgaaagcatcatatttaatgatgaaaccttaggatcattcccttaaatgtctaggacaagacaagaattgtccattaataccactgccattcaacattgtattggaactcctagccaaagaggagaggattaagaaaaaaagcatagacatcagattttttaaagctgtaatttttttcttttttctggacaacaggatcatctagctagaaaatcgaagagaattatctgtcaagctattctagaacaagcaagagtgagttcaacaaggcagccaaatccaagataattttttttctttttttttttgagatggagtctcactctgtcaccaggctggagtgcagtggcgcaatctcggctcactgcaacctctgccacccggttcaagcgattcccctgcctcagcctcccgagcagctgggattacaggtgactgccaccatgccctgactaaatttgtatttttagtagagacagggtttcaccatgttggccaggctggtcttgaactcctgaccttgtgatccacccgccttggcctcccaaagtgctgggattacaggcgtgagccaccgcaccgggcccagagacaacctgttctgcagcccatttgcttcttccagagtctccctctgtcgtccgggctagagtacactggctcgatctcggctcactgcaacctccgcctcccaggttcaagcgattctcctgcctcagcctcctgagtagctgagattacaggcacctgccaccacgcctggctaatttttgtatttttagtagagatgaggtttcaccatgttgtccaggctggtctcaaactcctgacctcaggtgatttgcctgcctcagcctcccaaagtgctgcgattacaggtgtgtgagccaccgcccccaccctctatttgcttctttgagatgaatcaccccataaatgattggtaaacagagtaatgatgtcagcataacacaagcatgttggttaacatgcaattttctccaggaagttaacattttgaagcaatcagggccaagctttctcacagttaaaggggaagccttagtactaaaagaagatcttcagaggaaaaagctgcaaatctacagaagtgtcttcctttggatccacggtggctggtttagtgacttcaaagaccaccatatttgtcacagtgttatgcctatggcaaatccatgaatgcagatgaagaaattgcaaatatatttctcccatattaaaataacagattaatgaaaaagatcacaccttggatcacatttcgagttttgatgaaaatgatccccatcaatagttaatatctccaaccagcatccccaaagaggaagcataagccccaccttcaaggctgcaaagtgctgctgaaagcaaatgctcatggaaatttacctattctagtgtttctattagcatcattattggttttgtagcactctgaatataaagttgtatacaagaggccgggcatggtgcctcacacctgtaatcccagcactttgagaggccaaggcgggcggatcacgaggtcaggagatcgagactatcctggccaacatggtgaaaccctgtctctactaaaaatacaaaaattagctgggcatggtggcgcccacctgtaattccaactactcggaaggctgaagcaggagaatcacttgaaccagggagtcggaggttgtggtatgccaagaccgtgccactgcactccagcctggcaacagagtgagactccatctcaaaaaaaaaaaaagttgtatacaggtttttatttttacttttttttttttgagtcagggtctcgctctgtctctcaggctggagtgcagtcagtgccacaatcacagctcacagtagcctcgacctcctgggctcaggtaatacccctatacctcagtctcccgagtagctgggaacacaggtgcacaccaccacacccgcctaattttttatttttttgtagagacggagtctccctatgttgcccaggctagtctgaaactcctggactccagtaattctccctcctcggcctctgaaagtgctgggattacaggcatgagccaccgtgcccagctagttgcatatattttgagcaatctgtctctaactctattttttccatgaagtcttgttaattttagtgcaccgttttgaagaactgaaggttttttaagaatgcatatagcaggttatagcagaaacacttatactcagaatgaagctggggctctctcttccaacaagcatttttgatatgctccgagtgtccctgctaggtagccaggagaccaggtaacccacttccctctgacaatggaacaattccccaaggaccctgaggggcagttctctggagtttgggcactagagtccctcttatttcctcttcttctctcctccctctagaccccataccactcaggagaggccaagtaaaaagacccagaattttgcctcttacaagcttagagatcttgaagaagtcactgaacctctgcgggacctactttcctcattctttaaatagaaaggcagtgggttttttgtttgtttgttttttgttgtttttttttttgttgttgttgtttttgttaatcgtggcgatggttatttatttatttatttattttgagacggagtcttgccctgtcgtccaggctggagtgctgtggcgtgatcttggctcactgcaacctccacctcccaggttcaagcgattctcctgcctcagcctcccgagtagctgggatagattacaggcgcacaccaccacgcccggctaatttttttttttttttttaaatagtagagacgggggtttcaccatgctggccaggctggtcacgaactcctggcctcgtgatccgcccgccttggcctcccatagcgctgagattacaggcgtgagccaccgcgcccggcctggttgttaatttttaaaactgcctttcatttttgctttgccatttatagctctgtagccttgcacaaatgacttcacttctctatgagtcatctgtaaaatggggctctttgtgaagacttaacgataccacgtgtacaaagcactgaatacaacatgcacattaagctccccgaaattgaaactcctataaaataggaatcggggattctcaagagcaggagttctgacttcagcagaggaacccagagctggtggggaaagcagacgtggctgtgacatccccagggacactaaacacatcctcccagccccatcttccccgcagagtcccgccaccggcccgacccctaacttgctccaaccacccgccgacgcccgcagcccgctgtttgggggccgccccctgcagcgccaggtccccgcgcggactacagttcccagcgtacatctcggtcggggggtccgaggggccgtcctgcctcagggataaggtccaggctgcgttcgcggctccgggcagtcacagtcatgcacgcagctcctatttttcgcgttgctaatcgcgtccgttgcagtccaacccatcctgggccgcggcccccacagggtctgtgaggagcgcttccccccgccccgggcgcccgctacgccgcgtccgaaggaggggccgaggccgggctcatctccccgggaggactccttcggcttcgtggggtgtcatgtccattgcggcccgaggctggccgcggggctctgctggagggcgctgagagccgggccccgaggccgcacggccggagactacaactcccaggaggcaccgcggcggcggcgcccacacgtcactcgggccccgccggtggcccggggaagcagcacgggcggggggcaggggctggggccgaccgggaggccggtgccaaggatgggggccgcccggctgccccgcgcgtgaggaggccgaggggcgcgccaccccggcccggggcggccgccccaggggccccgccacccccgcccggcccggcagtcgtggcccgggatgcggagccgggggccgccggtggagctgcgcggggtgagcggcgcggggaacggggactgcctgccgccctcgccctcgtcccccaccggcggaccccggcgggcattcgagagccgcgcggccaggccctcttagccctctgccgtttggggggcacgggtgaacctgccgccccactcccaccccgccccgccccgcccgtacagccaaatcggaagggacgagcctgccctttgaaagggttttttttcttgctcctgcggagggcgccccagccatggccctcaggagctccctagaccccgcagggactgccctccatcccggccgccggggcccgccctctgcatcccgcgggcagcctgtgtgaagcggcctcccgcagcccccggcccctcccccatggaggaggaggagggggcggtggccaaggagtggggcacgacccccgcggggcccgtctggaccgcggtgttcgactacgaggcggcgggcgacgaggagctgaccctgcggaggggcgatcgcgtccaggtgctttcccaagactgtgcggtgtccggcgacgagggctggtggaccgggcagctccccagcggccgcgtgggcgtcttccccagcaactacgtggcccccggcgcccccgctgcacccgcgggcctccagctgccccaggagatccccttccacgagctgcagctagaggagatcatcggtgtggggggctttggcaaggtctatcgggccctgtggcgtggcgaggaggtggcagtcaaggccgcccggctggaccctgagaaggacccggcagtgacagcggagcaggtgtgccaggaagcccggctctttggagccctgcagcaccccaacataattgcccttaggggcgcctgcctcaaccccccacacctctgcctagtgatggagtatgcccggggtggtgcactgagcagggtgctggcaggtcgccgggtgccacctcacgtgctggtcaactgggctgtgcaggtggcccggggcatgaactacctacacaatgatgcccctgtgcccatcatccaccgggacctcaagtccatcaacagtaagtggtgtcctctccccaaaattccttccacagaacctctcaaggccaggcctaggtggtgggaaacagggtgagggacaccagatgacactgtgcctggagtgagaaggggcagcagtatgataccttcagggtgaaggtgaggtaggccttgcctgccttaagggagaaaaaggaggctcagaaaggttgaaggacttacctgcctcccaggctgcagagtcacaatcgctcagtaaacatgtatccatgaacacctgcgttccctgcatgaacaggacagatgcagtgcctgccttcaaggtgcttgccatccagccatgctgccagagtccaccaggcagagacaaaaagagcctaccccgtctggagtcagtgtctctcaaccccagcactattggcacttgaggccagatcattgttgtaggggctgtcctgtaaattgtgagttgcttagcggcatctttagcctcttcccactagatgtcattagcattccctgccccctctccccagctatgacaaccaaaagtgtctccaggcattgcaaatgtcccctggggggcagaatcacccccagttgagaaccatttcctggagtcttcataggccgagctggccaaggcaaactggaaaagatgagggaggaattaaattgatgtggcttatataaaagcttccaggctgcctgataggttctccaaagttgattggttggttgaataaataatggagccaggtagaagggaacattctgcaagactcatttctagatggaagagcttcatgtggtgtcaacaagtattaattgagcacctattaagcaggagcccagctgggagtaagacagccatggtttctgccctgacagtactcacaggctagcaatttcattcattcattccacagatatttccagagtgctgtgtgccagaccctgtcccagggatacagcaagaaaaaaaaaatcttacattcctggctctcccattcgtgctgtgccccatctcactccctttcatttcttcattcatttgttcattcttccatttggtatttaccaggccagatcatgtgctaagcaaaggcatcagcagtggagaaggccagcatgtccccggccctcacgtcactcacagttaagccccaaaatgtgaaggtgccccctttgctctcaacacccacatctcatctattcctgatttctgtcacttctacatcttgaaatttattttaatccatcccactatttttaggaatatattgctattccccacccatagcaattgtaagcccctagaatagagggactgcatcttccttgcctcccaagcctgacatttgtatatcaacagagagcttggctgggcgcggtggctcacgcctgtaatcccagcactttgggaggccgacgtgggtgcatcacccgaggtcaggagttcgagaccagcctgaccaatatggtgaaaccccttctctactaaaaatacaaaaattagctgggcatggtggcatgcatctgtaatcccagctactcaggctgaggcagaagaatcgcttgaaaccaggaggtggaggttgcagtgagccgagattgcaccactgcactccagcctgggtgacagagcaagattccatcgcaaaaaaaaaaagctaacatgtgaccacgatgtgccagagctggtgctgtgtctggggaactgatgcttatgccccagcacctctgaaatgttgggtaaatggaggcagggccacccagcatgctcctgttgaaggctgggactcctcagcccttcctcacctctgctgattgacagcacgccccacacccccaggttttttgtagccagtgctatctggtcaaagggtcagtgggcctcttatggccagggcttcctcccggggtgatgggtctgctctgtgccagaaacagaggacacagcgcctccacagcactgcttccccactcatcctaccctaaggagcgcctcatctgccatcattcattcattggttcattccaccagtaattcttaagtgcctactcttactaggcactgcctcagctctgggattacagaagtgaacaaggcaagatttctccctcccccagctatggaatttatattccggtgaacaggaataaatgatggatagatggataccaaaatttcagagagtatcaggggctctcagtggactaaggcaaaggctggagcagagggttctctttatttagatcgggtggtcagggaaggcaacatttgagcagagacctgaacaaaggggacccagctttacaaagatctggggaaggggaacagtggggcacatgccctgaggtgggagtgagtgtgtctcactggagaacagcaagaccagaacagcaggcattgaggcagagatgggaggaagtaggatcagaaaggctggcaggagccagatcacataggaccttgggggccatggtgaggacttggggtattttatttgatgtagtggaagccattagaggatttgaagcagggagtgacatgattacataaagattttgaagggggactgacttaggcccagcctgggaaatacagaaataaagcataaaaccatgagatgttccctctgtcacagggtttcgatacaaacaggagaggtggggacctaagaagggaaaacttctgcagaggtggagttacagactaggaatttacagtgggggcttccaggaggaggtaacactgaagcccgcccggcctttttttttttttttttttttttttttttttttttttgagacagagtcatctcactctgtgacccaggctggagtgcagtagtgtgatcacagctcactgaaccttccgcctcccgggttcaagtgatccttccacctcaactttccaagtaggcagggctacaggcgtgcgccaccaagcctggctaatttttgtatttctagtagagacggtggtcttgccatgttggccaggctggtcttgaactcctgacctcaggtgatccgcctgccttagcctcccaaagtgctaggattacaggcatgagccaccgcgtccaatctgaagctgggctttaaaggatgggcaggattatcaattgtgtgaccctgggtgatttgccaatctctgccaccttcagttccttcatctgccaaatgggcatgatagtagaactaccttactattattattatgactgggaagtagccaggaatggcaaaaagaaaagtggagaaattcggaacaattatggcaatatcacacactaataataacagctaacacttttaaaggccctattgcttcaggcaataaatttttactataacgctagaaggtaaattctgttacgagccccatttcatagaggagaagtctcggtgtgaagattaaagtaaactgtacagggttatgcacctaggaagaagcagggctgagactcaaacccaggcagcacactgtatactttggagcctctatgtgatagaaggtagtaaaatatctcagcagttaagagattgagctctgatgacaaaactaattcaagcctttgtcctgccattttctaaccatgtgacctcttggccaagtgacttctgagcctctgttagctagtcaagaaaaatgggttgtggctgggtgcagtggtttactcttgtagtcccagcaatttgggagtccaaggctggaggattgtttaagcccagaagtttgaagctacagcaagccataatcacaccactgcactccagtctgagtgacagaaaaagaccctgtctctttatttatttatttatttcattgagatggagtctcgctctgtcatccaggttgaagtgcagtggcacgatctcggctcactgcaacctctgcctcctgggttcaagtgatcctctcaccaaagcctctcaaatagctgggactccaggcacccgccaccacacccagctaatttttgtatttttagtagagacagggtttcactatgttggccaggctggtctcggtctcctgacctcaagtgatccacctaccttggcctcccaaagtgctgggattacaggcatgagccactgctcctggccaaccctgtctctttaaaaaaataaaaaagggctcggggtgggggtcattcatgagtcaattcctatagagagcttagcacagtacaaacactagccatgatcctcatggctgttagtgacaacccgggtagaaagtaagctagaaccatccagtatgtttagggaatacttcagtcagattttgtcacgatcatgctgtgtaataagctacccccaaaactcggcatcttaaaacagccattgtgtattactgctcctgcatttgcggaccagctggagggtaaactgatggaggctgggctcagctggagaggctttgctccaagtagctctcatcttcttggacaagcaggctagctgaggcatgttgtcatggtgatgacacaagtgcaagagggccagcagacatgcaaggcctgggcttggaattggcaccctgtcattcttagccaaagcaagtcatacggctgagccagagtcagggtgcactctgcctttgtttttgtttttgtttttgttttctcggagacagagtctcgctctgtcacccaggctggagttcaatggcgcaatctcagctcactgccacctccacctcccaggttcaagtgattctcatgcctcagccttccaagtagctgggattacaggtgagcaccatgatgctcggctaatttttgtatttttagtagagatgaggtttcaccatgttggccaggctggtctcgaactcctgacctcaagtgatccgcctgccttagcctcccaaagtgctgggattacaggtgtgagccaccgtgcctggccatactctgcctctttagcagaaagaatggcaaagtctcatggcagagtgtggacacaggaaggggtagaattgggaccctgactgcagtgtgccacgggggtgatagacacgagggggaagccacgttcctcccttctgccccaggtttgcacttcctgcttccagggtagctgggaactcaaggcctggaggactaaggccttggctgttgtttcttttttttgagacgaggtctcactctattgcccaggctggagtgcaatggcaagaccatggctcactgcagcctcaacctcccagcctcaagtgatcctcccaacttagcctcccaagtggctgggactgtaggcatgcaccaccacacccaggtatttttaaaaagtttttgtagagatgaggtcttgccatgttgcacaggctggtctcgaactcctgggctcaagtgacccgcttcagccttggctgttggttcttgaccattcatggagctccccaaagcccaggacagaatcaggagggcagaggacacaggaggagctccctactccctcatgggagcctgggacagggattagacctgggcggaggggctcatggatgttccaggccaggaaaggacctgccacagagcggggcagcctgaggcagtgagaggaaagacgtgtttctagctgaggcagcgggccagaacacttgggtctgcggcgtggcaggtctggggtgacccacctttcttcccaccccacagtcctgatcctggaggccatcgagaaccacaacctcgcagacacggtgctcaagatcacggacttcggcctcgcccgcgagtggcacaagaccaccaagatgagcgctgcggggacctacgcctggatggcgccggaggttatccgtctctccctcttctccaaaagcagtgatgtctggaggtgctgaaaggcgcggccgggatggcctctggggagtaagggagggaggaaggggtgagggcagagtgggagggagggtctcctgctgaagccaggatctcagtctgacaaagggacctgctggcaaggtcaggccaccagacaagtgccagttacctgttcagctagcacaaatggcaactagggggcacactggattagaataaaaagctcataggatctagagacaaggccgggcgcgggggcgcacacctgtaatcccagcactttgggaggccgaggtgggcggatcacttgaggtcaggagtttgagaccagcctgaccaacatggtgaaaccccatctctactaaaaatactaaaattacctgggcgtggtggcagatgcctgttgtcccagctactcgggagactgaggcaggagaatcacttgaggccgggaggcagagattgcagtgggctgggattggccactgcactccagcctgggtgacagagcgagactctgtctccaaaaaaagaaaaaatttaaaaaagcatagagacagcacatggatgctagcactgaaagccccctcagacactagcccatgcactgtcccatctgtcagacaggaaaatgattaattcactcattcattccttcatctaactgcaccgggttctagggatatagcagagaagaaaaatacatgcaatccctgccctcaggaatagtaagtcagtcaacatacaagaagctcttttttataaagctgttttttaagaaaattataatttttaaagacaagtacaccagaaaaaagtgttagtacaaagtgcgaggaggctgagaggaaggcactttaagggctggaagactacttttgggaacgcttctctgagcaatctgagaaatgatacttcatctgagttccaagtggcaaaaaggaaccagtcacgaaaagtttggaggaagaaggaggtgctgaggtgagcatggtgtgtcccagaaacagcaaagaggcccatgtggctgccactgtgcaggcaaggaagagagaggtaggaaattatgtaggagagggagctggaaggccctgtgggtgagggagtggccttcaggttttattctaatgaagtaggaagccatgaggagccatgtctgaatagagtggtagctcacacctataatcccagtactttgggaggccaaggtgggaggatcacttgaggccaggaatttgagaccagcctggtcaatgtagtgagaccccatgtatatgaaaaagaaatttttaaattaatttttataaaaggaagtaaataaaaactcctttggaggccgggtgcggtggctcacgcctgtaatcccagcactttgggaggcccaggtgggtgaatcccttgacaccaggagtttgagaccagcctggccaacatggtgaaatcccacctctactaaaaatacaaaaattcggccaggcgcggtggctcacgcctgtaatcctggcactttgggaggccgaggtgggtggttcacttgaggccaggagttcattcaggactagcctggccaacatggtgaaaccccatctctactaaaaatacaaaaattagccaggcatggtggtgggtgcctgtagtcctagctactcaggaggctgaggcaggggaattgcttgactgcaggaggcagaggttgagatggcgccgttgcactccagcctgggtgacagagcaagactccatctgaaaaaaaatacttaaaaataaaagctcctttgactgttaggtagagacagccaatgatgggtctgttgctgtcaccagtgagagttgatggtggccatggagactttcaacccaggaccttctgcttggttggagccaaacctgggtctccccatttactgttcccgtcaattcccagctgaggctccagattgtccaagcagcaaattaatgggtatgggactgagacagatcagacaggaagtctccagctcagcctagagcagagcagccctttgggagaatttccaactggctgtacatcaggcgttcatttgtgctaccttttttttttttttttttttttttgggacagagtctcactctgccgcccaggctggagtgcaatggcacaatctcagctcactgcaccctcctcctcccagattcaagtgattcttgtgcctcagcctcccgagtagctgagattataggcatgcactggctaatttttatatttttagtggagacagggtttcaccatgttggctaggctggtcttgaagtcctgacctcaggtgatccgcccgcctcagcctcctagagtgctgggattacaggcatgagtcactgcacccggccgggcaggctaattctttctgatgtggtcctgtcctgtacttagcaggatgcaggatatccacacctccccgccataaacttcagtaacattctcagtcattattacaatcacagtaaccccataggtttccaaggacatgggagagaggggtggatcatgctaccctccagttataaaccactgtttctcccccaccttgtatggtctccattctgaagtttacttcatgatccaaaatgactgcttgagctccagcgttttttgttttttttttttttttgagctggagtcttgctctgtcgcccaggccggagtacagcggcgcgatcttggctcactgaaacctctgcctcctgggttcaagcaattatcctgcctcagcctcccaagtagctgggactacaggcacatgccaccaggcccagctaatttttgtattatttatttattttttttaatttttcagtagagacggggtttcaccatattggccaggacagccttgatctcttgacctcatgatctgcccacctgggcctcctaaagtgctgggattacaggcgtcagccaccgcacccagccttttttttttttttttttttaacagggtcttgctctgtcacccaggctggagtgcagtgatgccgtcacaaatcattgcagcctcaacctcctgggctcaagtgatcctcccacctcagcctctctagtagctgggactacaggcatgccaccacaccaggctaattttttgtagagacgaggtctcactttgtttcctacgctggtctcgatctcttgggctcaagaggtcctcttgtcttggcctcccaaagtgctgacattacaggcgtgagccactgtgcctagctccacacgccagctttttttttttttttttttttaattttaagttctgggatacatgtgcagaacgtgcagggtttgttacataggtatacatgtgccatggtagtttgctgcacccatcaacccatcatctaggtttgaagccccgcgtgtgtcaggtatttgcctaatgctctccctccccttgtcccccaccccccaggctccaggttttatgtctacattccaaccacaagaaggggaaaaaaggaaaatggcaccccttctttttattttttgagacgtagtctcactctgtcttccaggctggagttcagtggcacgatctcagctcactgcaagctccgcctcctgggttcacgccattctcctgcctcagcctcccgagtagctgggactacaggcgcccgccaccacgcctgactaattttttgtatttttagtagagacggggtttcaccgtgctagccaggatggtctcaatctcctgaccttgtgatccgcccgcctcggcctcccaaagtgctgggattacaggcgtgagccaccgcgcccggcctcattttcttacccatgttgtttttgttcctgcgctcctgtgcctgtctgctgtgctgagctgcagatgtgtcctgccgcggcttcgcaggacagggataagttgagacaggaagcaagaagccttgcctgtcaggctgcccttggcatgactagagtgtatgtggggattttcacctcttattttggggtccattctgttccttctttgaacaatagtctttacaggatagggtgtttggggacagatttcatcttatttaagatataaataatataaaattaacccactataaatttatttttcatttaaaaaaatttttaaaagacaggctctcactctcccacgcaggctagaatgtggtggtatagtcatagctcactgcagccttgaactcttgggctcaagccatcatcccacctcacactctttcccggccgggcaccccttctttttgaggatacttcctggaagctagttgcctactacaccccctcctacatcccatgtaccagaactgtggtcatgtggcatgcttagctgcaaaggagaatggaaaattcatgcaggcagcatgtggccagctcaattcaccagcactgtcactgaagaatgggaggctgtcagctgcatatgggggcagtgattgtgtctatctcttcccaatgtctaaaatggtgcttggcacacagtaggcacttaataagtatacgttgaatgggccgggcgcagtggctcatgcctgtaatcccagcactttgggaggctgaggcaggcggaacctgaggtcaggagttggagaccagcctggccaacatggtgaaaccccatctctactaaaaatacacaaattagctgggatggtggtgcacatctgtaatcccagctacttgggaggctgaggcacaagaatcacttgaacccaagaggcggaggttgcagggagccgagatcatgccactgcactccagcctgggtgacagagactttgtctcaaaaaaaaaaaaggatatgttgaatgaatgcatgagtggatagtggggagaccagggatctactccaggataaacaccacacagaatggccatcaggatctgggaggatgtagagtttgcagaggaagatagccttgcagggaccacagcacagtgacgcacgctctggtaccatggagccactgagagcactgtcgtgggcagcaggcagacctgagtccaagtgtggctccaccactcactagctgtgtgaccttgggcaagccccttacctctctgagcgtgtacctgctcatcagctaaagcaggggtcataccaaatccttctgccttacagggctgttgtgaggattaccgagtgcctagcacagtgcctggcctgcagtaagtgctttataaatgttaaataatgttaactggtttttagaggtaagtgctgagtgttttggggaaacgtagaggaggggcctctaacctagctttggaggctgtggaatcaaggaaggcttcctgacagagggggcaacctgtgttgagacttgagggacaaatagttacacaagggaagagtgttctccacaaagggaacagcatgtgtgaaggccagaggttagaaagcacagggcctgctcagtattcagtgtggctgcaagatgaagttggggttagaatgggctgagagtgtttggaagtgaggctgcaggggtcatcaaaggccagggccaagaaggatggatttaggtgggatgcagtggctcatgcctgtaatcccagcactttgggaagcccaggcaggaggatcacttgagcccaggagtttgagaccagcctgggcaacatagtgagacctccatctctacaaaaataaaaataagaaagatggatttggccagtaggaacacgggacctgaagattttcaggcaggggagagggaagacaggccgagcaaaggagagacatcagagagccaaacccaccccatctattggagaacaaggccatggaggtcaaagcaagttcttgtgacctcattggccgggggtggctgttggggtgagggcagccctgcatgggaccaagggcagggctgggtataggtgaggattggggtgggctgcgacatcacccctccctctcccctgcctgcagcttcggggtgctgctgtgggagctgctgacgggggaggtcccctaccgtgagatcgacgccttggccgtggcgtatggcgtggctatgaataagctgacgctgcccattccctccacgtgccccgagccctttgcccgcctcctggagggtgagccggggccccgtgacgagggtaggctcagcttggagtggcagggacctgtgggcccagacctttccccttcacacctatccataccagtgggcccaggagtgaggaagaaggggctggaacccactggactctaaacagcctccccatggttggctccatcccccacatcccagcccttgtttgggccaggcccagagctctcaggacaacctgttaggattccttggccctgggattccaccttgatcctgattccactaccagcccctcctcggggtgcaggtcccagggtttctctcccagcgtttcactgagtggaattggccaggagcttggctttgaatcccttcccctcagctccatagcagctgtttgtctgccatccccagaaattctgccttcctctgagcaggctgagtccccagagcatgaccactgacacctccatgccccaccactgtccttcctcctcccaccccagaatgctgggacccagacccccacgggcggccagatttcggtagcatcttgaagcggcttgaagtcatcgaacagtcagccctgttccagatgccactggagtccttccactcgctgcaggaagactggaagctggagattcagcacatgtttgatgaccttcggaccaaggagaaggtgaaggcagggggcaaggtgggaaagatggagcaagacccctgagttctgatgccttgggctgctcagagactcctcccctgaaccccagcctttgggtccatgcagggtcaagggagccttttttgcatattaagaaaagacagcctcctgttggtggattaataagaaaaaggcaccctgtactgaagtacttacaggtgacactgcatgatgtctggggttggctttaaaatactacagcagaaacgaagagagggcaagaggagagaaggacggggatacaagattcgcaaagcataggtaattgttgaaattggatgatgggtacaggggggtgcactgttctctgcttttgtggatgtttgaagttttctaaattgaagagttaagaaagaaaaagaaagaaaaagcacccctttctttgagctaacacagttccctgccctggcacccagcttggctagcaaagcatgagtcgggtggtgaaaccagtgtaccccacagcaaggtacccttgtgtgaggcaccaaccagacgcagcagccctgggtccctccccaggaagcagagcagctaagcccctccccccagccaccgcctctccttcccaggagcttcggagccgtgaggaggagctgctgcgggcggcacaggagcagcgcttccaggaggagcagctgcggcggcgggagcaggagctggcagaacgtgagatggacatcgtggaacgggagctgcacctgctcatgtgccagctgagccaggagaagccccgggtccgcaagcgcaagggcaacttcaagcgcagccgcctgctcaagctgcgggaaggcggcagccacatcagcctgccctctggtacccacccgtgtccccagagcgccccccaagaggctgctgggagcagccccgacctaggatttatctcttccttttctttttcaacttgtttttattgctaaatatatcgcacatagtcagtgatcagcccagtgcagtggcgagcacttgtagtcccagcctactcaggaggccaaggtgggaggatcacttgaggccagaagtttgagaccagcctgggcaacatagaccccatatttaccaaaaaaaaaaaaaattttttttaattagctggccacgttggcatgcacttatagtccaagctagtggggaggctgaggtgggaggatcacttgagtccaggagttcgaggctgcagtgagctgtaattgcaccactgcactccagtctgggcagcagagcaagaccctatctctaaagggaagaagaagaaaaaaagaaaatgaccaaaaacctgtacagccaaatgagttactctagtcacccccatgaaagcagagagaacctcacagccatcccaagtgctttctacctgcccctccagacaacctcacaccatcccctgagaggaacatctgtcttgacacttaggacagtcacttctgaactttctttttcatgttatctctctttaaaaatatcttttaatctggccaggtgcagtggctcacgcctgtaatcccagcattttgggaggccaaagtgcgtagatcacttgaggctaggagttctagagcagcctggctctagaacatggtgaaatcccgcctctactaaaactacaaaattagctgggtgtggtggtgcacacgcctgtaatctcagttacttgggaggctgaggcacaagcatcgcttgaacccggaaagcagaggttgcagtgagccgagattgtgccactgcactccagcctgggtgacagagtgagactctgtcacaaaatatataattaagatatacatatatatgctgatatttgaccatttttttacctacaaaaacagaagtttcacatggatcaacctaatagttggatctcaagacttaatcagattcagattcaggtttgattttttttttccccacactgcttcccaggtaatgcattcaggagggaggcacgtagtgtctacttgtctctttctgtgatgttacaagccagaaagcagtgccttaagcagcagtggccagtggaaatataatacaagccacgtgtataattttaaattttctagtaagctacacataaaagcaaaaagaaataagagatgtcaattttaatattttttattaggccaggtggggtggctcacgtctgtaatcccagcactttttggggctaagacgggcagatcacctgaggtcaggagtttgagaccagcctgaccaacatggagaaaccccatctctactaaaactacaaaattagccgggcgtggtggcgcatgcctgtaatcccagctactcaggaggctgaggcaggagaatcgcttgaacctgggaggcagaggttgcagtgagccgagatcgcgccattgtactccagcctgggcgacaagagcaaaactccatctcaaaaaatatatatattttttaatttagcccaatatatccatgcaatcaatacaaaataattgtgagatattttaccttcttttttcacactaaatctttgaaatccagatgtattttatatttatggcacatctaaatttggacagtaaattttcattaaaaatttttttttttctgagatggggtcttgctatattgcccagggtggtcttgaactcctgcgctcaggcagcgctcccactttggcctcccaaagtgctgggattacaggtgtgagctactgtacctgacccatcaaaaatattggatctgtatttagatttcataaaagttagagttgaaaaagtacatatacatacccaagttgctccaaacatgcttaaatgtttccaataaccaaatggagtacctgttttttgttgtttgtttttttgtttttgtttttgttttttttgagatggagcctcgctctgtcacccaggctggagtgcagtggcatgatctcggctcactgcaagctctgcctcccaggttcatgccattctcctgcctcagcctcctgaatagctgggactacaggcacccgccaccacgcctggctctttctttcttttttttttttttttttttttttgtatttttagtagagacagggtttcaccgtgttagccaggatggtctcaatctcctgacctcgtgatccgcctgcctcggcctcccaaagtgctgggattacagacatgagccaccgcgcccagcccccatacctgtttttaaaatttaaactcaaattgcggtaattacaataaaataaagagttggctgggcatggtggctcacacctgtaatcccagcactttgggaggcggatgctggaggattgctcgaggccaagagttcaagaccagcctggtcaccacagtgagaactcatcctttatatatatatatatatacagtttaaaaattagataaataaaggttaaactccaattcccccattgcacaagccacatttcaaggtgctcagctgctacacgtagctactggcggccatattggacactgaggcctaggtccttgatccacaagagctcttgtgcttgtacttattaaaccacagtccattgctgagcctcaccccaacttgctgattcagggagggcccaagaatttgcattgccaagaaattttcagctgatggtgatgctgctgttctggggcccacactctgagaaccactgcattaaggaatgaaaaatggcggtgttcccattctagaattccttctctacttctacagaagaaaattccctttggtaatccctggaaccatttgcttaggaaagcttctctttctttctgcaggctttgagcataagatcacagtccaggcctctccaactctggataagcggaaaggatccgatggggccagcccccctgcaagccccagcatcatcccccggctgagggccattcgccgtgagtatctcccaaggccctgaccagtcagtcagtcagtgaacaaacattttttagcacgatgtttatacctggcaccaagccagagtaacagcaagaaagaagacagacaaggcccttttcctcattcttatcacaggaaacagatagtaaacaaataagtcagtaagcaggataatttcttttttttttttttctttttttttggagacagacagagtctcgctctatctcccaggctggagtgcagtggtgcaatcttagctcactgcaacctccgcctcctgggttccagcgattctcctgcctcagcctcccgagtagctgtggttacagtcacacatgaccacgcctgcctaattttttgtatttttaatagagatgggggtttcaccatgttggccaggctggtatcgaactcctgacctcaagtgatccacccacctcagcctcacaaagtgctgggattacagcatgagccaccgcgcccgggcgcaggataatttctagtagtgataagttctttaaaggagctcagggaagggaataaaagaggagatgtattaatcggagttcttcagagaaacagaatcaacagcatatgtttagatatatagaaagagatgtattggctgggcacgatgactcatacctgtaatcccagcactttgggaggatgaagtgggaggattgcttgagcctaggagttcgacaccagcctgggcaacaaagcgagaccccatctctacttaaaaacaaaaacaaaggccaggcgcggtggctcacgcctgtaattccagcactttgggaggccgaggcaggcggatcacgaggtcaggagatcgagaccatcctggctaatacggtgaaaccccgtctctactaaaaatacaaaaagtcagccaggtgctgtgacaggcacctgtagtcccagctactcgggaggctgaggcaggaaaatggcatgagcccgggaggcggagcatgcagtgagccgagatagcgtcactgcactccggcctgggcgaaagagcgagactccgtctcaaaaaaaacaaaaacaaaaacaaaagaaatagatgtattatgagggattggcacatacgattatggaggctgggaagtcctgcaatctgccttctgcaagccagaggtgcgggaaagccggtgatgtagttccaaatcaagtccaaagacctggcccagcacggcggctcacgcctgtaatcccaacactttgggagaccgaggcaggtggatcacctgaggtcaagagttcaagaccagcctggccaacatggtgaaacccagtctctactaaaaatgcaaaaattagctaggcgtggtggcgcatgcctgtaatcccagctactcgggagactgaggcaggagaatcacttgaacctgagaggcggaggttgcagtgagccgagatcgtgccactgcactccagcctgggcgacagagtgagactcagtctcaaaaaaaaaaaaaattgtccaaagacctgagaacctgaacaccaatgtccagtgtctcagggcaggagaagatggatatccacgctcatgcagagagcaaactcacccttcctctgccttcctagacaaaaagagctaactctctttttgttctgtctgggccctcagtggattggatggtgcccacccacattggcgaggatgatctctctttactcagtccactgattgaaatgctaatcatccagcaacaccctcacagaaatcatgtttaaccagctacctaggcgtcctttggcccagtcaagttgacgcataaaattacccatcacagaagggttgcgattttccatctggaagccctatgggaggaggtgaggtttgagcagggaccttcctgctgagtgagacaggctgagacctcagggaagcatgcccctggcggagggagcagcaaaggcaaaagctggaggtgagaacagcatgggctgcttgttaacctgtttggctggagcagagtgaatgggaggaggacataggttttgtgatcagggagttctcaggggtcagatcaggcagggccctgagagcaggataagagtctggattttcctttcttttttttttttttttttaattttcatttgacacctttggtatggatttttttgtttttaatttttgtttttagttctggggtacgtgtgcaggatgtgcaggtttgttacataggtaaacgtgtgccatggtgatttgctgcacctgtcaacccatcacctaggtagtaagcccatgcattagctatttttcctaatattctccctcccccaccctaccccccaacaggccccagtgtccgttgttcccctccctgtgtccatgtgatctatttgctcagctctcacttataagtgagaacatgcagtgtttggctttctgttcctgcattattttgctgaggataatggcttccagctccatccatgtccctgcaaaggacatgatctcgttcctttttatggctgcatagtattccatggtgagacagacgctcgctctgtctcccaggctggagtgcaatggtgcgatctcaactcactgcaacctctgcctcccaggttcaagcgattctcctgcctcagcctcccaagtagctgggactacaggcctgcaccaccatgcctggctaatttttgtatttttagtagagatggggttttcaccatgttggccaggctggtctccaactcctgacctcaagtgattcttctgcctgggcctcccaaagtgctgggattccaggcaagagccaccgcacctggcctggtatggattttcttttaactgccctggggcagcccccagagccatgcgagcaaggcactgagggaatcaaattgacctttttccctctggctgctgtaagaaataaaggtggagaaagcagtgagatgatggaggccaggccagggtgggggacttggaagggacagatgtccacagtcggggctatatggcagagacacggtcatcggagtttcctggtgggttgaagggtgaaaggctagctcccaagttccaacacctcattcaccccagcactgtccccacccacagcccccctgccctctgtctgggcacctgctttgtaccaggcccaggaggtcagtcctgcaggggacacagagacaaatacccataccatggcagcaaacactggcaccagataggtccagagcattgcaggtacagagatgaaggcagctgacccccagggaactaactacccagagctggagaccagaagcgcaggcagcccgccagaatgaatggtgaagggttaggctgtgaagaggaggggaggctggaggagttggcagggaaccgctcatggccttcagtgccaggcggaggagctggaaccttgtcctgacagcagtagggggctatggggagatatatagcagggagggtcatgactggagttcaaaagagcccttggactcccaggcggagggtgggcctgagctgggggcactggaggctgggagcccagtggggacagatcctccacccagtaaccaagtggcttctctggacccagtgactcccgtggactgtggtggcagcagcagtggcagcagcagtggaggaagtgggacatggagccgcggtgggcccccaaagaaggaagaactggtcgggggcaagaagaagggacgaacgtgggggcccagctccaccctgcagaaggagcgggtgggaggagaggagaggtgaggtgtggtgtggtcatgcccaccctgtgcccaagccccagctcccaggctccaggccacaggactgaggtctccatctctccctggaccccgcaggctgaaggggctgggggaaggaagcaaacagtggtcatcaagtgcccccaacctgggcaagtcccccaaacacacacccatcgcccctggctttgccagcctcaatgagatgggtaagagcctgggttcttgtaagggggtgggggttccctggccaaaggggtgagcctcctggggctgagcgaagagaccaggtttcactgggccagtgagtggaaggccttcctgggaagggagatggtggcccctggggcgtggggggtcatttccaggggcagggaccacccttctctgaggcttctcctggagacagattcaagaacgatgctcgtgggtcttggtcttgctgttggaggggtcatcgggggctgtcccttggcacaagtccccgtggggccctggccagccctgcagcggagtgatggccctctccggttgcagaggagttcgcggaggcagaggatggaggcagcagcgtgcccccttccccctactcgaccccgtcctacctctcagtgccactgcctgccgagccctccccgggggcgcgggcgccgtgggagccgacgccgtccgcgccccccgctcggtggggacacggcgcccggcggcgctgcgacctggcgctgctaggctgcgccacgctgctgggggctgtgggcctgggcgccgacgtggccgaggcgcgcgcggccgacggtgaggagcagcggcgctggctcgacggcctcttctttccccgcgccggccgcttcccgcggggcctcagcccacccgcgcgtccccacggccgccgcgaagacgtgggccccggcctgggcctggcgccctcggccaccctcgtgtcgctgtcgtccgtgtccgactgcaactccacgcgttcactgctgcgctctgacagtgacgaggccgcaccggccgcgccctccccaccaccctccccgcccgcgcccacacccacgccctcgcccagcaccaaccccctggtggacctggagctggagagcttcaagaaggacccccgccagtcgctcacgcccacccacgtcacggctgcatgcgctgtgagccgcgggcaccggcggacgccatcggacggggcgctggggcagcgggggccgcccgagcccgcgggccatggccctggtgagtgaggcgccctgcacccaggtcacagaaaaccccttctttcctcctctgccagggtcgcaagtccagcccagccacgacccctcaggcagccacctcctgcttcttgtggaggagggagggtctgtgtccctttaccgctcactcctggaggcatcgggggtctccaggggactgagacacaggcggcaaactgatgcctataaggccaggcaggtgcctatagcggttgtgaccagcatgaccatcgccaattcttacacagcctagacactgttctcctccatctgttaactgggtgggagatgcggccatagcagtgttattaagtacccacgtcaggcactgtgctgcttgttttaagttatggttattctatttgctcctcacctgcgtggtgaggcaccatttttatcccccttcagagctaagccatgcctgagcttagcccagtgcaggagagtcgggaagaccagggctttggcccccgaggctgccgctaagcagcagttccagaaggttgaggaacatgccagggtccacccagaggagcaagcagctgggagtggtcccagtctaggtcaaggtcccagcactgccacactacagatggaaactggatgcagcaagatccacggatttctcgagagaaaccagaacttgtgcttttcatgtaacagctctgggctttttaatgccaccctctgccccaccccactcacctcctctgaacctctcttaccaggccctcgtgaccttctggacttcccccgcctgcccgacccccaggccctgttcccagcccgccgccggccccctgagttcccaggccgccccaccaccctgacctttgccccgagacctcggccggctgccagtcgcccccgcttggacccctggaaactggtctccttcggccggacactcaccatctcgcctcccagcaggccagacactccggagagccctgggccccccagcgtgcagcccacactgctggacatggacatggaggggcagaaccaagacagcacagtgcccctgtgcggggcccacggctcccactaaggcctgcccaccaccgcccgcctgggcagccatgaatgtagcgccccaggccctgccccagcccgccatgccacaaggtgggggaggccctgggcaggatgttcactctatttattggggaaggagggaggggggggacacttaacttattcctttgtaccccagggggtggagccctgtgcccaccctgcactggggggagggtgggcagggatactcagggacagggcatcatgggggatttggcacaaaatggagcattaaaggtaacccctgccccctaccgcacttgattgtgttcctttttccttttttttttttttttttttttggagacagagtcttgctctgttgcccaggctggagtgcagtggcaccatctcagctcactgcaacctccgcctcctgggttcaagtgattcttctgcctcagcctcatgagtagctgggactacaggctcccgccaccacacccagataatttttgtatttttggtagagacagggtttcaccatgtcgaccaggctgctctcaaactcctgacctcaagtgatccacccatctcggcctcccaaaatgctgggattacaggcgtgagccactgcgcctggcctagactgtttctttccctggcccaggccctgatgctgggtcatcccagtggaacattccccccgaccccacacaccctccctgggcttctctgggtttctaaggtccaagggatgaggccctccctggtccccccaagaacaccacacaagttatgatcaccagtgacaagtgttttaccaacaaacacatgagtcgggggaagttacatggtgaggtgggagggcgagggatagagaggtccccctggattggcctcagccaattacatcccgagtctgggacccagccccactgtcttcccgctggaggctgcaacgattcatcttcagctgagtcagctggatgtagcggagcacattggtgtctgcaggggaggtgggcagggcatcatctgggtgtcccggggcagcaggtgacttccacacctccctggctcacaccccattctccgaagtatccagcagctcgctcacacagccagtagagccagagcccttccccaaagccccagtcacagtcggcagtccccagtcacagcggagccatcgcacacctctgtgcgcctgtatttgcggcaccctctgccaggaatgcctcttcgcagaggctcccgtcacacttctcatcctccagcgacatctgcaagaagtctgttctctccgagccacttaacaggaaaactaatctcgtctcggctcccacaaccctgcacctgttgtaatccctcttccttcttcattggctcttaatacaaaactgagtgttgtgtctgccctcctgcactcatgtgtgtaagtgcacacatgcacgcacacacacacacaccccaatttcctggcatcgtccacccgagtggatgagtggatggtgcaggaagtgaatgaataggtgtgcgtgaatgggtgagtggaggaatgagtgtgtgcggtaggcaggggtgggacggggtaatggagatgacagtgggtggatagggaagtgactgagcaggtgaataggagatatcagatgtggcaatgacggtagatgagaaatggccggggagatgtcagaggagcgataggtggacggatgtttgaatggcgggtgaagggcggggtggatgaatggatgagtgggcgtgtagggagtaggtgggtggcgcagccctacctagaagcagctccgcgggaggagggctctgctattctgccctgatcttcctgcctgttccctccgctgcagcccctttccccgccctgggcccagccctcacctctgccccgccccgccactcacctgtgggttcccggctgcgggcctcctgcaggtagcgcagcgcgcgtgcgtagtcgcccaggtggtagaaggcaatgccggcacggtaggtggccttgaagttgccctgctgcttctccagtaccttgagacagtactcgcgcacgcgctcgtagtttaccagctccgactgcagcaggcaagctgcgagggccccgcggccggcactctcagagcctgctggcacccccagaacccacctgactgcgaggagccgaggctccaggcggcagggaaccaggcctaagggattgctccggcaaccaggggcgccaatccgctcgcctatcgaaacaggcgcaactgcgccgctgctagggggcgccaaaacacggacaggcgccactgggcgatccacccagagctgtcggtgggcaagagcactaaggccccgcgcgggggcgagggccgggacctcgagagcctggctcagggcagacttcctcaccttgggtccacgtgcggccagggggtggaaagaatgactcaggggaagcgaggccctgaatacccgacccaaagaccatttcctgcatcccagctccctccagccacagacccctgtcatcccctacccctaatccctttccttgatcaagctctgaaggctcccccagaagcccacagccctggacccttcagccccagggcccctggcccccaagtcgccaagctctcccgattgccccctcccctcgtgccccatccccccaccccccgacggcgtacccgtgagggagtcgtaacactccacctccgtgctctccaccaggcgccgctgctcctcgctgaggcgcgccggcccggggctgctggtgggcccgggggcgggggcgggcaggccgctagggcgggccccctgcgccgccttcagctgcagcagcgctcggtggtacttgccgatggcctcccggaacttcttctctcgatagcagcgctggccctctgccttgaacgccacggcggcacgcaggctgctgtcgagcgccgcgcccaggctccccgacggctctggggtaggaccgggacgagccgagccatggcgggagcccgagcctgggcccgagcccggtggggagagggcgggaggcgggcgcggcggaggctccggggcagcgctgagcatcagcaccggggacagcgcgccgcgctgcattgtgggaaactcctgccgccgccgctgcagctaccgcatcgccccccgcggggctggtccccaccctttctccgccccctcacctccggcagccgactccggctgccccctatgggtctagggaaacccctcgagacttcccccatgctcactctcaaattaaccaagtcctagttctccagcccgccccccgaattgttcccattccccttaccctccccaacctcctgcctgctctcctccccggtgcccaaagctcccgaagatttctagaaggaaaggacgagcctgggggaaagagcaggaagacatcagcctcacggaaagctggctctcagcccactggccatttggcatatcgaatgagaacacaggatttggacccaagcttcccaaattcaaatccctgcttactttctcactagtggtatgacttagacagctcgcttaaactacctggaactctgtatcctcatcagtaacatggcacaataatatcacctttagggccagtcgaggtggctcacgcctgtaatcccagcactttgggaggtcgaggtggatggatcgcttgaggtcagaagtttgagaccagcctggccaatatggcaaaactccgtctctactaatatacaatatatacaaaatttttgtatatatacacaaaaattagcctggtgtggtggcgtgcacctgtagtcccagctactcgggagactgaggcaggagaatcacttgaacctgggaggcagaggttgcagtgagccgagattgtgccactgcactccagcctgggtgacagagggagatgccgtctcaaaaaaggaaaggaaaggaaaggaaaggaaaggaaaggaaaggaaaggaaaggaaaggaaaggaaaggaaaggggaaaggggaaagaggaaagagaaaaaaggaaaggaaaggaattaaaaataataccacctttgggattcatctgttaatttatgaaacaaatattcactgacatcctttctgtgcccagctctgtgctggatgatgctgggacatagcagacactgcgtgagcttcagaccctactctcactgggccccagttcagtgggaagacagaccagtgaccagacagtgacagccctgagcaggctagcctgggaagcacaggcagaggggtcggggccgaggtggaagaggcacaggcagaggggtcggggctgggatgtgggaggtacctgccctgggctgaggtggtgataaagtcttcctggaggagggaataactctaaaaacaagagagatctccttcttgccctcatccagctcggctgtctatgggggaaaacaagtgagagggcaaacaagtccccaggaaaggaagcatgcaggaggctttcaagaaaaaaatcgaggatgaatgagtcaactgcccttcagtcctcctttgccgcctccttagctgtgggacctgggccaagttcctcgatcctcctccttcggcttcgtctgtgcgacatgaggatagaaggcaagttaacctcagagcggttgcagagactgaattatcttatgcaggtaaggcacttagcacagggcttcatacattaatgggcaattaacaactggtgtttcttatcgtccattagactctgagtcatgtgatcatgagtgcctggctctgagtcagcatccatatatagttgttgaatgaatgagtgtgtgagtgaatggcattatgcattactactcctccccctcctctgagactctagcttgggtctcagccccaggcctccccactctccccaactccacccccacagcacatcctctagctggaggtcccatggcaggtcacatgtgacagacagaaaccagaactcagcaccttccatctcaaccagagcatctgcctctatctcttattgtactttgctgtaaaacgcttttgctgagtgagtttctcccttatccctggggtccagccttgaacacctcaggggtgcaaacattttcctctctgcatctccaaacccaggctcagttaggagtgtaaaactcatgaatttgagttcttgagcagtgcacacacctttccctacctccggtgtgtctgttttgtaatgaaaaacacagagatctggctgggcgcagtgactcacacctgtaatcccaggactttggaaggccggggcaagtggatcacctgaattcaggagttcgagaccagcctgggcaacatggcaaaaccttgtctctaccaaaaatacaaaaaattagccaggggtggtggcgtgcaccacttggaaggctgaggcgggaggattgcttgaacccaagaggtggaagttgcagtgagctgagatcacaccactgcactccaacctgaatgatgacagagtgagaccctgtctcaaaaaaaaaaataaaaaaaaaaggagatccgttgattcataaccatgttttctgacgaagtaaatgcctaggtacccaggcacagtagcacaggacaactgtacctaaaatcacagtcctgctgggatgcaatgctaacacttttacaacacctcctaggtgtcagacattgtcataaagagctttcccttttatttattttttattatttattttgagatggagtcttgcactgtcgccggggctggagtgcaatgacgtgacctcggctcacggcaacatccaccttccgggttcaagcgattttcttgcatcagcctcctgagtagctcggattatagaagcccgccaccacacccagctaatttgttgcatttttagtagagacggggtttcactatgttgaccaggccggtcccaaactcctgacctcgtgatccgcccgcctcggtctcccagagtgctgggattatagacttgagccatcgcacctggctgctttacgtatattttaactcacatcctcaccacagtgtcaggaggttggtaccataattatccccactgacacctgggcacttcccaggttaagtatatcagaccccattgataaaactcttactatccaggacttactactacaaactgatgaccttcgcagagcatcttccaggcttgggagaacctatcttcatagcccagtatatgtgatgtgttgggcttgtacaaccattaagaaatattgaattaggccgggtacggtggctcaagcctgtaatcccagcactttgggaggccgaggcgggaggatcacctgaggttaggagttcgagaccagcctggccaacatggtgaaacatgtctctactaaaaatacaaaaattagccgggcgtggtggcaggagcctgtaatcccagctatttgggaagctgaggcaagagaatcatttgaacccgggaggcggagtttgcagtgagccgagaccgcgccattgcactccagcagcctgggcaacaagaacgaaactccgtctaaaacaacaacaaaaacagaaagactgaattagttgacatctaaacgcagatatggaattgcagaatctcaggtttacttgaataagatctgaaaatccggcaacatcgaggtagcatttcttctgaccgggatgggcattctcaactcccccacagtccccatctcttgtgattttttgccagtccttaagggatcccagttttatcccgctgaatgactcttggggaagcccgccattgccccctggtggaggagttcagaatttgcattttatctcccagcaaccattaaaggaagtggtgagcacatccaatcagagggatgcgaggcctagaaagcgaccaatcaaaagcgagaggggaccggaattcgaccaatgagggcagagagcgctcagaataaaataaattcttttattgagatgagagacggacacacactgggagggttttgttttttgttgttgatttttttgtgactgagtcccagtactcagggaggctcagactggaggcggcggagcaggcaggcggcggcaaggctggtcccctggcgctggggccgcgcatacttgaggaagactgcggcgcgacccggcgcgggacctcggagcgcagcgcgggccatgcacggctcgagggtgcccagttcctcggggctgcagcagggagatggagaaactgaggcagggcaagtggttggagatgacccatccttggaactggagactggaggctgagaagaagcgtcgatgtggttccccacggacgggtcgggggctctcttgagatcgggcacgcgtcccgtcttcaactggagtgactaggcgagcaccggggagaggtggacaccctattcttcctacagggcgcggctagtgcggagtcagaacactcgaggaagcaaggaggggagctgaggatgggcagccatcctctctatgctgggtgcacaggctgagggaaaccatggttcgccctgccacctggtagcatggttagcggccctagcagctaaaggaacaccccatccaccaccagatacagagatggaggactcgaggcctgggtgatccttcgttctcagccctggaaggcaataggagcatcttctgggcctgggagactatcttccactctggggcaaggttaagagaccccagatctggactaatggggtcctcccaccccattctctcccacacccagaaaaatcaagtctaggtgccacctcctcctcaataattgtctctcattctccgagaccgtaaaaatgaccaggaaggtaagtccctgaagctgcggtgaccccatacacttcctccgccaagactacacctgtaaagttctggctggagcctggagcccgccccgtcgagcaagcggtgcgccaggctcagagccgcagccgcacgacgacccggctcccatcccgccgcctcggcctccagcaaagacagctccaggaagtaggtggcaagtaacatcacctgcaagtgaggcggggcgactgtcaggccacgccccacttcgcgccggccacgcccccaccccgcgtattcacaagggctcacctgggggctgctccctgccagcgcggccagcagcccgaggcacagcagcgggccggggtggtgcagccggaaatccaggcggctcaggatgcgacgctcggcgcgcagcagctccgcccgtgagaaggagtccgcgctcaggaggcagaggaaggcgggctgcagatgggggatgcggggggaggtgaaggagtcttggatccgggctctttactccctgccctggaaaggccccaagttccggacctcagtttcctggtgtgtaaaatggggccattgacttgtgtctggaagtcgtagagagcacgggcttgagggtcctgggttcaagacctaggttcgagttcaaaccccatcatctgctcactgtgtgacataggacattcacttaagctctctgcctcagctaccccccgccccccgtaaaacagatactactccctgcttcaccaggcagttctgataaggcactgaattcatgcatgttgacggtaactattcaagatggactagtttatattatttttatttacttttctaaattagagacgaggtcaccttggctccccaaagtgatttgttttgtttttttttgttgttgttgtttgtttttttggagtgcagtagcgcgatctcacctcacagcaacctccgcctcctgggttcaagcaattatcctacttcagcctcctgagtagctgggcctacaggcgtgcaccaccacacctggctaatttttatatttttagtagagacagggtttcaccatgttggtcaggctggtctcaaactcctgatctcaagtgatctgccggtttcagccttccaaggtgctgagattacaggcgtgagccaccacccccagccttaagacagactattctagactgagtccaagttccaactgcttgatttggggcaaatgtcttcctctctctgagcctcggtctcctcttctgtttaagggacacattgacagcccctccctcatacatgttgggaatcccagactcagcacggtgcttggcacacagtagtcactgaatcagttactccccaaaggactccatccaccctcccaaaccccaccccggaagtacctcgggaagcacgcactcttccattttgcacgccacaaacaggcaagccacgcccagcagctgcaggcgatgtagacgcacgcggccagcgctcaggtaggaatcaagcaggtgaaccgccagataaagtgtgtcaccagccagacccaggtactcctgaggaggggcaagggtgaccacggggtcctgggcggcgacgcaaactcagccccccacacccttccagatacctacgtgcacctggaccagccagtctaccaccagggcgcgcatctccggggtcacagcgcggggcagggctctcaggggcagcacgcggcacacctggggttggggcagggacgcttcactctccacacctgtgcctctgcctttctcctgagctccagccctggatgcagcagcctcctccagtcagttggacatcttaggcatgccacacccaaactggcctccaaatgagctcctcttacgtgtcctcacctagaactctgggcttcgttccagatgcctccatacccacctctccgccacgtggactcctgggcgtctccctctaggttcccagacttcactttttttttttttttttgagacaaagtcactctgttgcccaggctggagtgcaatggcgcaatcttggctcactgcaacatccgcctcctgggttcaagcgattctcccgcctcagcctccctagtagctgggattacaggcatgtggcaccatgcccggctaatttttatatttttgtagagacggggtttcaccatgttgaccagactggtcttgaactcctgacctcaggtgatccgcccacctcagcctcccaaagtgctgggattacaggtatgagccactgcacccggcctcagacttcaactcttgaccacgaatcctcaacccctctgcctcagagcacccagaagcatcttcccaaagaaagatctgaccaaggaactccccagcttaaaacccttccatggctcccagtacccttggagaaaactctgatttctttcaggctctgctccagcatcacctcttccctctctctccccacaacccatgcgtcagccacagctgccttctttttagctcctagactataccaagcccattcctaccccaggccctttgcacttcctgtttcctctacagagagggtccttccccagccccttactcgacctttccgtcattcagctaacatctccatgactttgtctatactcctaccacccgatcactatctctttgtctcagcattttcactgtgaagatgtctccctgtgtgctttgtctatttggccgctaggctgccagtcccacgagggcagggacttctgcccacaacacaagtgtctctcaggtcctaacagagatcctggcccaggagagtcgcaggcaagacgttcaacaaactcctcccttcagtcttccttccgcagcaaccctctcatagggatatctgaaggctggcgaggccaatgttttggtttgcgtggcctttccctagttgttctatgtgtttgctcatctccccagaacgaggccagcattgcagcatctccagcacctaaaacatttgctactaaaccattaaatatttgttaaacaaataaatgtggaggacaagtacaggggaccataaacaccccaggagggactgcaaagagcccggggacggtgggaaagggcattcccagcggtagaaacggcgctgtgtgaaaacaaaacaaaagcctggacgttgcagggaaggaacgccggctgccagtgatagggaggagaggctggagcggtgggagttcagagtggtgttgagtgggtgccgggcggtgggccggcgtcgccctcaccagggcaggcggcgggtaggctcaccatgacttcggcgaagatgtccccggcgtactcgcgttctccctgcagccccagcgcgctcagcgcctcctccagccccggcggcctcgccaggcgtcttggggagacagtggggcccgcggggaagccgtcggggactgcggcgcttgaaggctctgcgtcgagggaggcagcgagactctgcaaaggagagggcctgggggcccagcgcctaacgataggcccgagccgggagccggacccctggtccctgcctctcaccagcatcctccaggagggtgttgcgggcgaggccaagcaccgacccttgcagctaggggaagagacgcgcggcgggcgctttaaaggcccctgggcgcgtgcgcactgagcccgcctcgcccgggcaggtgcacaaaggtgagtgccccgcaggctggctctgtcctctcgaagccctctaaggtcggacagctggagacagatcctcatcctgctgcccggaagcagcccctctgggcctcgctttcctgaccataaagtcgggatgatttcaaaatgtagaatcagggtttgcaccgtcagaggatggatgtacaaacatagatcggaggttagaatgacccttgtggtgtcggtgtcgcaatggaattggagataaaattgtgtgaacacatggttgtttacatagaagttaagtgttgtgtggccgggtgtggtggctcactcctgtaatcccagcactttgggaggccgaggcgggcggatcacgaggtcaggagatggagaccatcctggctaacactgtgaaaccccatctccactaaaaatacaaaaagttagctgggcgtggtgccgggagcctgtagtcccagctactcaggaggctgaggcaggagaatggcatgaaccctggaggcggaacttgcagtgagcgagattgggccactgtactccagcttgggcgacagagcgagactccgtctcaaaaaaaaaaaaattttttttaaaaagtggtgtgtatgcaaacatgtatttcctagcttaatccactgggagagcttaagagcagcgacaccccaatagtgagaagcacccctaacatccaaaccctggccgccacatcccattctccactaaaaggaaccagggctacctggagaaatggctgatcccagggtcatacaagagaaggtacaagatctggaatatttttgtgtggcagaaagtgtcccaacagcagggcaagtcacatagatgcagaagtcactagctaaatctagaaaatgtgagcatcaagatgatagtcatagatcacaaaccactgaataaaattaaaatacaagtttattctgatataactcaggcagtgggaaagaaaagctcttctaatctttagaaagtgaactaataaatgtgttttgttttcagacagggtctcgctctgtcacccaggctggagtgcagtggtgtgaacacggctcactgcagcctcaacctcctaggctcaagtgatcctcccatctcagcctcccaagtagctaggactacaggtgtgcgccatcatgcttggctaatttttaaatttttctgtagagactggggtatcactttgttgcctaggctggttttgaactcctgggttcaaggaatcctcccaccttggcttcccaaagtgctaggattacaggtgtgggccgccatgactggccgaactaataatgtagaaggttggaaaatcctatttggcaaccaccacagcatcgtttcatgcaagaaatatcaatagatgttcaaactagtgggtgaacatctgataggaatcgggatatctacaaaatgtctctacacaagatgtttattaactgtgtaaaccaaaaggtatctgagataggtgtcaatcaatttagaaagcttattttgccaaagttaagggtgtgcgtgtgacacggcctcaggaggtattcggggcacagcttggttttatacgttttatggagacatgagacgtcctcaatatgtgtaagctgtacattggttcggtccggaaaggcaagacaactcgaagcaggggagggggcttccaggtcatagacaggagacaaacggctgcattcttttgagtttgattagccttttactgaatgcacaatttacaggaagagccatccatgcctagtctgggtcaaacaataggacggaggaagccatcagatatgcattggtctcatgtgagcacagggatgactttgaactctgcctgtcttctgtccacaaggaatttccttgcgggcaaatggagagacgtaagtagctttaaaaaaaaatatatatatatatatatatcttttaggccaggcgcagtggctcacgcctgtaatcccagcactttgggaaggtgaggcaggcagatcacttgaggtaagttcgagaccagcctggccaacatagtgaaaccctgtctctactaaaaatacaaaaattagctgggtgtggtggtgggtgcctgtaatctcagctactggtgaggctgagacaggagaatcacttgaaccctggaggcagaggttgcagagagccaatatcgcaccatggcactccagcctgggcgatagagtgagactccgtcttaaaaaaaagagaaaaaaaaaaagtgaggcaaccaaccctggttgagggaaaataactgcaaaataactgccctgtgagtttcacacctgccaactgaatgcaacatgtgagcctggtcattagctaggaatttttaacatacaaggacattaagcgtgaccattagcgaacactataaaatctgtacagaagagcagtttcaatgttagcttcctgaccttggtaactggagagcagttatgtagcagaatgttctttaggacaggtatacaatgtggagcgggaggtggaggggtgaatttaacattctgatcccatttttgtccgttttaagtaaaatgctatgacgaacctggcgaagggtatattttgtaattcttctacataacttttttgaatagattgacagttcccacctaccccacacccaatttccccaatgaacatctcatattagtgtgccccatttgtcacaatccgttagaccaatattcatctattaagtccatgctttattcaagccttcctttttccctacgttctttttctatttcaggaaacattacatttagtcaccatgactcttttggttgatcttggatgtgtcactttctcagaattttctgattaaccaccttggcagacaaatccctcaactgagatctgtctgatgtctgcttcctctcagtgaggtggtgtgtgtctgcaagaggaggatcagagggaaagtgccattctatcacattaaagggacactgtgaaggtgattcatcagcagtgtttgcctcgattggctggatgatgtagtgtttgccagggaccttcactgaaaagttacttttccccctctccacactgcactctttggaggagtcactgcagcccacgcctaagaagtgggggttccatagccctccttgaaggctgtctacagaaattacttatgattttgtgtagatttgcatattctccccattttgccacttagcaatagacttatttcacattttaggtgaaaacccaatattatgctatttattttgttgttcaaattcttttcagctttggccactggaagctttctgttggctcctgtgtccctgtgacttaagcatatcagtgcgtgctttcaggcactgcaagatgccccaggctcatcttgtacatttcctgccccaggcctggaataatcttagtacagcactatttttgaaagttttctgcaagtctgcaattatttcaaaatttaaagtatctgaatggctacacttttttggaaaggtactggacattaaaatcctgggatgtagacaaacaaaagcaccagcacagtacagatggatagctagtttattacaggactgctggtagcaccaaacgaaaccaagtcaattcctgttaacggggcagctgaagcggttgaggggtctaccccatggaaccccaggaagcagctggaaagcctgagttccccccatgcagcagctaaaagggaatcgcactgccgcccccgactccacacaaccatcagtgcacgagggcagcccccagaggcttcacattaactggaaaagattacacaaaaagagcaggaaactaccaatttatgatgccgtgtccatttgcagagaggtaatcagcaccaaaatgagtactcaaggccctgcgacctcgggtgaatttcctttcttatactcctgctttgctgtcttttttaatagcatgtatcatgttttttttttttttatttttagagacacagtctcattgtcccaggctgcagtgcagtgccgcaatcatagctcactgcagcctcaaactcctgggctcaagtgatcttcccacctcacctcagccttccaagttagctgggattgcaggcatgcaccaccatgcccagctaatttttgtattttttgtagagatgaaggtctccctatgatgcccaggctggtctcgaacccctggcctcaagagacccgcccgcctcggcctcccaaattgctgggattacaggcatgagccactgtgcccagtcactgttctttatatacaaaaaagaatgtgtgaaatttttaaaatgtacattgcaaaagacgattattctactcaaaatttatttggtaagattttattaagactctaagttcaaacacccttcttgggaaaagctctacaggataaccacacatgctcaactacggggccagctgctgcagctgtgggaccccatcctgtggaagaggagagaggcactaaaaagatgaggtagccaggcctgtgcccacactacgagacctgcatcaccatggtgtgaggagcagcaacgtgggtcaactcggggctgggacgagatggaagagtaaaaggcctttcttcataggcctgcctattttatgaccaccagggtagacttttgtaattaaattaaggtccacatgactttagaaagacaaactaaaaaaccccaaccaaacgagtcctagctgtagctaactctgatttctgtaaattggatctgactttttctgcttacattcacttaaaatctcaaagactcaatgggtgtgaagtgctaacaccttgcggcaaaatctcaaattcatctgtgccaggccctctgcacagcagggctcagcagggcaggccagggctctggtccctggtcccttgctgggggaggtgttccatccggccagcgcccggccatgcagccacgtgactcaagcacgggaagtgcaggggcccagacacatccaggctaaagggcagtgactaggggagggctgaccccaagctgaacagggttctaaccaaacgctcaggagctcccaggtgacagcaaccacgccaccatgaacacaccactgggtctgtactggaatttgggggcctcaaggcttccaggtggcagcataaacagggaggtggggcaggataggaatgcccccctctgaggctcggcagccgggtggaatgaaccactccctctcattcagtgacagcacaggcaccctcctcattctgggctacccagatcttccagccctgtccctccaccccacctctcttagcctaagcagcactgagggcctggagtggtctctgtccaccccacccccacatgcggggagccttcccatacccctcagccccacagcaccagctccacccaccctctccagcctgagctcctgcacacaccccagctgccctcaccctgagctcagtgccctccttgctgaagggaacggctagtacaggaggagctggggcccaggggtctgactccatcaccaaggcaaagcccagagtggttgggctggcgtgagtgcaggctgggccctggtctgaaatgagtgtctttattgcttgtaccgtacaaatatgaagacgaggagaaaggccagtagggacggagaactgtcagataacaacatcgcacacagaggaaaaagaccctcacccacccgaaccaaccccacccctccccaccctgccatgaactgtgtagtacaggagatgggatagggagagcaaacccacaaaagctaaactccaaacacccagaggtgttgctacagggaggggaggcgtgggcagggcagctcatggatcacagtggggctcctcccactaggtcagcacccctcccccacaggatgaaatgctcgggccagggatggggcccaagcccacacaccatgcacactggaggacacgctgccctcacacaaacacacatgcacacacacccacgtgtgcctgcgtcccgccgacacacgcagtccgaggcacgcacaggagtcccacagcactgacatggacgtgcactcatgttcaaccttaaggctgcagaacgtggggccctggggagagggaggggtgaggggggcctaggagcctcccttttcagaggccccccaccccaataggtaccagagatgcccacccccacccctccctgaccaagtccatggggcccaatactgtccggtgtaagattgtaacagccaaggctggtggccctccacccccgcagaggagagggtgagcccagcccatagcccccagtggggccaggccaggcccagggtccagcgggaggtaaggccagctggaaggaagccctagtaaggcacggggctgggaggcaggcaggtttggccccaaatgttcctcctgcctcatccatagggtgaggacagtttggtggggaggaggccggaccaggaggcggcacccagcccggccactcctggttccccatggtacagatcctaggatctgactccattcaccagggagcagccctaacccccagccctgcagctcccaagggcccctgcctgcccctggacattattgcttttctgcccccatagggggacagcgggtgggggattggaccgccccgtgcctggccactccgagcctaggccacggggcctggaaggcagcaccactgtctgccgggtgtcgcgtcccaccagaaggcagccttcgtccagatgcagcagcgcggaggcagacaccagcacgacacccaggccagaaactcaggcaggccccaggcgccatgcttcacccctcactggggcttgtgtggattaaaacctgaatctccaaccgcccaacagcccaggcctgggcgggaggtggagtcttccaaatgcgagtctgggcacaaaggtgaggctggaggctggaggcaggggctgcaggggccgctggggtgcgtctgggaggggcctgaagaagaactggaaagggggtgaggaggtgggggtggggacacaaaccaaaaaggctaagtaaaaagttagggggaaaaaaccacccagcggtgatggcagcgagcgtgcgtcctctgcgtgggcagactgctcactcgcggatgctggccgagtaggagaactgggggaagtgggtccgctggtccagctccagtaagcccaggctgtcatctgtgggcggcagaggtggatggggaggaccagtcaggagagggcctgggacacctgcccagactccctggggaaacggccccagctggcgggggctgcccacaggacaggacaggaaaggcccatccctccgcaatggaggccctcagccacggacccactccccaaacctgagccccgggcggcctcctctgggagtttcctgtgcccttgcccatgcgccccacagctggcagggccttctgagcctcccaccttctctctgccccacacaccaccatgccagagtccagcccagagccctgtcctggcctgcctctcgcaccctcccatccattctccacgggcagccaggggggctttctaaaggcctgctttaaccctgtccctctctgtatgaaacccttccatggctggctcccgccatgcaagcagtccccacccctcccagtggcccccagacccttgcactccagccccatgccctctcttctcaccaccatctccctggctgctgccggtccttagctatgccatgcttctcccattgctggcatcccacacgtcattcctccggccagctgacacgtttgcttcctcctctagaaagccctccctaactgcaggccaggtcggatatttcctctgggattccccagtccctggcctcccacgccctagccctgaccactccaggccgcccaccctacctgggctgggagctttccagggcagggcccagggctggctcaatcagtgctgtgtccccagcatagcccagccctgggctgagttcagagtaagaacccaaacagctgtaaagcagtgaacccagccaggctcagggaccgggctgcctcctgccctgagccccccgactgagctccagaacgtgctgcagtcaatggctcctggtggcctcaccaggtccaaagaggaccaacagcaaaagggcctgagagcagacttggggaaatctcccagacatgaagcgggggccttcgagggccctccttgagaagtgagttaagagcagatcccatccctccacccctggggcaggcacaccagcgcgggggccccaggcactcacagcggtcagggggtgtgattgtgatggactgggcggtaaattcatcatcgaagtaccttgtgtcgacctcggacgtgacctgaggtttgaagggtggcaggagctacggaggagaggagctcaggctcagggaccctgaggccaggaggcctcaaccaaggtcaccacgagtgggccaggtccctgagggtcctgctggggcaagcagtggggctcaccttcttctggaccacgtcctgccagttgatgctgaggaagaacctgtgctccatgacctccttggcatcgctgggccccccaccaagcctgtgcagagacggccgtcagcacctgcctcccggagcagctgggttcgggcagacgggctttcggagcaggcaggccctgtatggcccttaatgattctgtcttgaccacaaaccacttcacagaggaggaaaccgaggctcagggagggagctcacgtgcccagggtcagagccagggagtcagcaacccggacccacgtgtcctcactgcctggccttaccctgagtccagaaagggagttagtagggcaggctccgttcctatcctggctctgccacatatggtttggtggccccagccaggcccaggggatgccctgttcctcagtgtccccataaaataaggcagtgtcaaggatgggcctgccctgggggaagcactccctaagtgccactgtggacgttttcaggggctgtgtggggacgacacactgcgaccctacaagcgagcacccttgtggacgctgccccctccaggccgcagggacagtggcagcagctggcgctgggctgggtggggccgacgccagccctcacctctgcttggggtccttcttaagcagcccagcaagcagggacttggcctcggggctgagcgtgcgcgggaagcggatctcttccatgaggatgagctcgaagaggcgctcgtggtcctggttgtagaagggcaggcggccgcacatcatctcgtacatgaccacacccagcccccaccagtccacggcccggccatagtcattgtcctccagcacctgaggatggaggagaaatgagggctgggcccgtggccctgaggctggcatcacagtcctgccctcagggcatctgggctggaaacacacaggtctgggggatccccctacccttggcctcacacgttcctacccccaccaaccccagacacctcaggcgccaggtactccggggtcccacagaaggttttcatggtggccccgtcactgatgccctctttgcagaggccaaagtcagtgatcttgatgtggccatctttgtccagcatgaggttttccagctgttggaaaagtcaacggatctcaggtgcatgctcccaaggcttcctgccaccccagcctttccttccagggaaagatgcccggggctcctggacatcaaccctcccatgccaggctgggcccagcacacacagcctcaccctctgaggctcagagagaggccagatccaaccctcctcaccctctggcccacccccatggtacctgggaacagctgggcagggagagccgagagccaggccctgtccacccaccgtccccattgtgaactgtggttcttatttcgaacgtgggggcactagctttcttctattctttttttctagactttctgtcctttaattatgaaatatgcagccaggcaaagtggctcacacctgtaatcccagcaatttgggggacttaggtggcaggattgcttgaacccatgagtttgagaccagcctgggcaacacagcgagaccccatctccatatttcttaatatgaaaaaaaaaattagccaggcatggtggcacacacctatagtcccagctacttgcgaggctgaggtggcatctccccctggaaggccctgtgtgcccctcccggttactgaccatcccccacaagaattaacctctacttcccatctgtaccactgcacacagacacacctgtgaactgtggactcacctcctctgtgcggctttccctcgacattagcctatgagacgcgtccacactgtcgtgtgtagctgtagctcattcctaactgctgtgtggcgtcccactgtgagaacactccacagtggatctgactgttcctctcacagtggatacttgggttgttccagttggggctagagtaagtcctgctgctgagtgagggggacactttctaaggtgagtgtgtgtccccacttctcctgtgcacacagctagggcagatgactggtgctcagctttggtggacactgccaaactatcttctaaaattggccgggcgcgggggctcatgcctgtaatccaagcactttgggaggctgaggtgggtggatcacaaggtcaggagtttgagaccagcctggccaatatgatgaaaccccgtctctactaaaaatacaaaaattagctgggcatggtggcgggcacctgtaatcccacctattcgggaggctgaggcaggacaatcgcttgaacccgggaggcagaggttgcagcgagccgagatcacaccactgcactcaacagagtaagactcctcaaaaataaataaataaataaatacaaataaagtaggtattgtggcagttgacactccgctagtggcctaggagcgctcatgggaggcttgggaaggtccctacttggggcaacttgccacagagccaccaccctggaccttggtggggagcctggtgaatgagggcagccaccaccctggaccttggtggggagcctggcgaatgagggcagccaccaccctggaccttggtggggagcctggcgaatgagggcagaagctcagcccaacttccccagtgtgagtcccatgtggtgtgcatgccacaggtcagcctggcgcacaccctgccactaaccttgatgtcgcggtataccacgtcccgcgagtgcaagtactcaagagccgagacaatctctgcaccataaaaccgggcccgctcctctgtgaagacacgctcccgggacaggtggaagaacagctgcaggaggaaggggtggggagaggaggtcaggccccagcccacccacctgccctcaccttcccagccccctgccccagcgcagtgatgtggtgacacctgtatcatgaaccagcaagtgacagctagagggaccaatcaaggcagagcgcagaagctcataagtgacacagagctggggggaagggcgagggtctgccaggaggcacccatgagagggtatgggagagacatccgagacaggagggaggatggcatggaggcaaaaagaagcacacgtcatgaccaagtaacaataggccatgggcaagcccagatcagacagatgagcaaaccacgcatcccaaagcaggtgtgccaaccactgcacagagaaggcgcgaggcaaggagtgggtgacaaaagtgaggcgactctgtaaggggaagctgagcggctgcgggaattcacttcgagaggacacgggaacggagggctgctaggttttaacccttgggggctttctctggggcctttaagaccatccttcccagtgctatcgccccacagccctctccacacctctctggactggtttggacctgacccacccactcactagctgtgtaaacttgggcaagccacttaacctctctgagcctcagtgactgcccccccaaaatggagacgaagccgcctgcctcaagggagaggggcactagatgacactgaaatttccctccacccttccatctcacccacagctcctctccatcccgccccaccctaaagaaggaggccccagagggcaaagtcaaggcagccgcggctcacctcacccccgttggcatactccatcacaaagcacaggcggtcgtgggtctggaaggcatacttcagcgcctgggggatgaaggcagcagggtgggaggtgggagggaggagggctctgctgagccatgccagggcagggccctggccctgcttattctgcacacacacaccctgccctggctggggcccccaggagtcagccatatggggttcacataccggctgcaccttttggggcattaagtgaaggcatggctctgcggtaggaaagggttacatgctgaaccatcttgtcctctgcctccatcaggcacagccaagggagaactagagctgttctgagcaaccatggctcttgtttttacagtaaaatgtgttcaacttacacacacaagtgatgtctgctgtggctgggagtggcaaaggcttgggagccaacttcaatgacaggatggacaggctgtcagtcaacaaacagtagttctccactgcactaaggagatctacagagagttcctcagagactcccaccagggggtccttcagctcatgacaactcaactattctgttttctgcactgaggtacctcataagattttatttgaaaaagtactgtggcttaataggatacctggacagcaactgagataaagaaatgatacataagccatcctcaatctagtccatttaactggtggccactggccttgatggagactgcagcccaaacaggcatctactcagtccaggctgacagacaacacaatgctaacacatctgcttctatgagcatatctgaaaacaaaaacaaaaaaaataatgtttccacttcaaccagctgggctaagtgctcctaactcatagagacagcagccagcaaataatgtgatatcttcagttagttcaaatgcttacatgaagccaccatctatgaagaagctgtcaccctcccactccccgagcctgctcacccccaccacatgtcttggttcggatgacttggcagggcgcagcaacaccttgccctgcccgcctggcctaccccaagactgtgctttgtaccagaagattagggctctctctctgagctctgtccaaaggctggcctcacactgtctgggaaggggagggcaactcacagtgaggaacgggtgcctggtgttctggaggacccggctctcggtgactgtgtgagcgacttcatcctgcagacagactgcgggtgaggggctggtgggcaacaccacacctgcccactccgccccgacgaaggggagcaaggccttgtgaaatgcaattccattcccagccataaatgcagaaaatcacaggagtgaaaagtgaaagcctgcaaaccctcagcaaatagcagacccagacgaggatcatcagtggctctcaaagccacaggtgaaaagtcagcaggaatgtcacaatgtaaggaccaggctgctagggacaagacacctgtgacgtccctgcaagggagacaaacagacatcacgagagccccgaggtgccaccacaggctgtgggaagtcccacctagaaagcattcttgcccaaagaaggaaaaacagtgcttcttggtgtggtccccacacagcacctcagcaccgcctgggaactggcagcaatgcaaattcctgggacctacccccaggcccactgagtcagaaactcggggtgggcccagcactgtctcacaagccctttgggtgactctaattcaggttctaatttggtacctgactgtacagcagaaccaccaggagtggttccaaaaatctggagccacctgcagcaacgtgaacacaggctctctctggggcaagtttatccccaggggacacctgagaatgtctgaagtcttttttttttttttccctttttttttttagctgggggtctggctctgtcgcccaggctggagtgcagtggtgtgaacatgggtcactacagcctcaacctctgaggctccactgatcctcccacttcagcctcctgagcagctgggactacaggtgcacgccactatgcccagctaatttatttttatttttacagagacagggtcttgctttgttgcccaggctggtctcgaactcctgggctcaagcgatcctcccacctcagccttctaaagtgctggaattacaggcgtgagctgtggcgcccaacccaaaagtcatttttgattgtcacaacttggggagctagtattggcttcagtgggtagaagccaggggtgctgctgaaaccctagaatgcacagggctgccccgacagcgcagaatcatctgtcccaaaacgttaacagtgctgaggctgaggaaggctgccttaggcccaatcgtcacatcaggaatgaacagctaatttggttggctctgatggcagcaccacatgattatattctttacagtcttcatctgtcaggacacatgttcaagtatggatgagtgaagtgacgtgttgtctaggacaggccttaaagtattccagaacaagagggacaggcagagctaaggaaacaaggctggctaaacgctgataactggttaaactggacaatggctacatgggggtccgtaatatttattttctttttaaatttttgaatgtctttggaatcttccactacaaaaaattcaaataagggaaaaagtagaattccactcctggcccggcctccacctgggataccctgagcaaagcccgggactccccaacagcgacgtcctccccaacaggccccagcctcccttgacagtacctgctgggtggggccccgaggctctctctctccacaggcacccccagcccctaacatagggtggaggtggggactcagcagcaaggcctgctgctcctctctgggcctcaggctcccccttttctgactagggggaatttgtgggggaaataagcccacagcagcagaaagcgcgggtaagcgtccaggcctcagggtcaggctccagaccgcagcccccacagaggctcgcgagcgcaattcccggggcacgcaccttggcaatgatgacttccttccgcaggatcttcatggcgtagtagcggccagtggccttctcccgcaccaggatgactttgccaaaggttcccttgccaaggagtttgagatagtcgaagtcattcatggtctgccagggacagggagagtgggggcagtcagcgcctggctcatggcccgtgggaggaaattttaacaaaagaaagaggaaaaccaaaagacactgttgccaaacggcttaggctggagcaggaagggaggctctgggcagcaactgtgtgttctgaagcggccttcagaccaggctctgcaggcacagggccttgggagggctgggctctgacgtgggggtagccaggtcttcaccaactcccaggacgaacctgcagtgggtccacccaaggttgctccctcccctacgggcatggagcacaccctagggcacctgccacctgaaatcaccccaccctgcagggcagccttgtctctcagctgagccccctgaactgtgttatggaaaccaaggagagcaggccagcactgggggtgggggcaccgcaggctggcagccccacccctgctcccagcacttaccactttagcccgtgccttgctgaccgccacttccatctcctcagtcgtggaggagtcactgggggagccacacttgtagtccatggggtcctcgcctggggcccgctgcttgaggctgttggcgaccatctggatggcccgcatccactcctccctgtgcagggacacacgtgagtcccagcagccaggagtcctgggcctcagagtcgaacagctgagtgccacctcccagccacccccagcaacaggcaagcaaatgaccacataaccatgggaatttgggcaagatctgtcagaaccagagagagctgaagggacctgagtgaaattccacgccaggcgcagtggctcatgcctataatcccagcactttgggaggctgaggcggatggatcacaaggtcaggagttcgagaccagcctggccaacatggtgaaaccccgtctctactaaaaatacaaaaattagtcaggggtggcattcgcctaatcccagctactcaggaggctgaggcaggagaattgcttgaacccgggaggcggagggtgcagtgagcagagatcgcaccactgcactccagcctggtgacagtgcgagactccgtctcaaaaaaaaaaaaaaagtggaataccaagagcgatcaccaatttccctaaagtgacctggcctgagggccatttgaagccaggcagcagggaaatgatcaaaaaggagtgaccctctcttttcacagccccttgaaaatgagccaccaccctgagccttgaatgagggagagagagtgctcctgtgaattcttcggaacaaatgacaagctcaagtttataagttaccaatgttttgtaaagttaaaccaagagtaagaagcagcattcattagccaaaggagctgaagacactgcaaggcaagagctggcccgcaggactccctggaggggacagtccactgggagcagggagtctgcatggcagggacagaggtcctggcagcccagggatgtagaggagagaagctggtggacaagaagtaggtcccagcagaagggagcctggtttaagaacagttaactagaggctaagcactgtggctcacacctgtaatcccagcattttgggaggccaaggtggaccaagtgcttgagccgaagcgttcaagaccagcctaggtaacaaagcaagacccatctcttaaaaagtttttaaaaaacaaaaataaaaaataaaaacaggccaggtgcgatggctcacgcctgtaatcccagcactttgggaggccaaggtggaggatcacttgaggtcaggagttcgagaccagcctggccaacatagtaaaacccagtctctactaaaaatacaaaaaattagccgggcgtggtgacgggcgcctgtaatcccagctactcgggaggctgaggcaagaggatcatttgaacccgggaggcggaggttgcagtgagccgagatcgcgccactgcactccagcctggacaacagtgcgagactccatcccaaaataataataaaataataataataataataataataataataataataaaataaagaacaataaactagttctgtcactcatggtttagaacttgctgagaaagaactgtctttgagctgggctcggtggctcacacctgcaatcctggcactttgggagactgagacgggacgatggcttgcatccggaagtttgagaccagcctaggcaacatggatacccactttgtagagaccaaagataaaaaattagccaggtgtgggggcacatgcctgtggtctcagctactcagggggctaaggtgggagaactgcttgagcccaggaggtggaggctgcagtgagccatgatcataccactgcaatcagctaaaaaaaaaacaaaataattttctttggatacttacaaactgttctgtctaataagtgaaaatgaccagagaccaaaatgaaaaatatattaggctgaattacaccaaattgtccacatcccccatttttgaccacactgcaattaggtgtttcaacccaacgcattttgaaccccccgtgtattttgcttgtatctagaaaatactcatatgaccaacaagaaaaataaaatgttcactaagaatgagaaaattcagagagtgtaatcacgcaaatcccagtgatttaaataagccacagggagtgcagccagcccttcacagcatcttccaggatggcccccgccccagggcaagtgtcactgctcctgtgttcctgagacactggggcccctacccaaggtcaggcagggaacaagtgtggctgggactgggcttcaaaatccaagccgggacaccctgctgggctgtattcctccccagtctcgtttcctggtgtaccacgcgaaactacttctatttccatccatcccacaacgcaccctcttccacattttgacactgctggaatgcagattaatctcacagttggggtctgtcttgatttaactgggcacgcctttttcttggcactatatgaaacagggtgcctccccaatgacagcgccttcgatttgatgaaatatcacagcagtgtttaatacacaggctgtcgtgaggtagaatgcctgtgaggcatctgtgcaatgagacattctgcagctgggggaaagattgaggcaggtctgtatgctgacttgggatgatctgagacttcttaagagaaaaaggaaggtgcagggatgggcaaggtagctcactcatgtaatccctgcaatttaggaggcagaggctggaggactgcttgagcccaggaattccagaccagcctagacaacataagaagaccacgcctttataaaaaatttcaaaattaaggaaggtgaagaacagtatacagttctgtgctcctaagttagaaaataatgaacttctgcagacacatgctcacataggcacaaacatctccagaagagaagtcatgatcctggagccctgcctgcctccaagggaggggaactgggagtcgaaggaaaggaacagcctctaataacaaatgggaagcacttgctatcatcaactatccctactcccacccattatgaaggaggaactggggcacagattgaaaaaacagattccagaaaaacagcagttgctccaggcttggtagctggaattacaaaaggcacgctgccctccccacccactcagagactggagtccccataacccatctatgtccaccccacggaggcagagatttccacctgctttgaacacagttctgcccccagaactcatggtggatactcagtagatacttgggtaatgaaagagtgaggcagccaaagtccaagtggccccagggccagggcgcagcagggcccagtgcagacccgggcagagcacgcactgagccctggtgcacacccgggcagagcggtgttggcttctgcactccctggcccaacatctcaagccagtatttctcaacttgctttaacccatgcccccttaggaacaaattacagcctaattcccaaaccctacactaatattcctgtttttcaaaaaaaaaaaaaaaaaaaagcaggggccggggacagggcaggagcccattccatgacaggcttttttcttttttgtttctttttgtttttggagacagagtctcgctttgctgccaggctggagtgcagtggctcccaggtttaagcgattctcctgcctcagcctccagagtagctggaactacaggcacccgccaccataatttttgtatttttagtagagacagggtttcaccatgttggccaggatggtctcgatctcttgacctcatgatctgcctgcctcggtctccccaagtgctgggattacaggtgtgagctgctgtgcccagccttccatgacatgctttatcagacatagttgtcctctcacaaattttaaatttttttaatgctgactctgagtaaatgatggcggattgggaaaaaaaaaatcacagatctcctaagagatacagtgaagatattaaaaaggaaaatatgtctctcatatataaagatcttgagagactgtcacgtgaagatggcagattgcagactaagatgtacagcgtggtatcatctttgttttcaaagacaggggtggagagaacacagatggtccctctgtggagagaacccaaatacatgaaggatggcactgccacaccaccagcccagaagcagctctgggaggctactccagatgggaatcaggagcacaggccctggacccaccccagctggggctccaagagtggctctgccacctggaccagctcagccctcccagctctcccctccaccagggcctgggcctggggctaagaggttggcgggctgtcggcgcagagcaccgcgcgcagggcggggtggaagggagggtgccgaagacactcgcaggggcgggcctaccccacctaccctggctcccactgcccaccctacagaaagctccagaaaccacagcaatgcaggaggttatctgggagtaactggggctcgcctgctgcctgactagcttccgatccaattctaactggaccaaagttgcaaggttgcagcactcagaattccagatgaaaagcaagggcctctgtccaggatccttctcaagggtttgcaacatggcgtctggggcaaaggggagctccccatgaagctgggcctcaagtatcttctagcccccagaggagagcccctgggtaaaccacgactgtaaaaataacagcactgagtggctagctccagacaccacctcgcttgattctcaagagcactgcaattctcaagagccagcatttctgctgtggggactgaggcacatggaggtggagtcacctgtgaaggtcacacagcagggatgtggcagagctggcactcacctgtgcacagcctactcctccttagcaccacccgcctgtccctgagcctcagtgaagcgctgaaagctacacgagactcaggagggtaaagcagggaccctctctagggaaggctcatgggacacccagccagggagcccacgggaaaagcaaaggaagaactctcctcgtaagccatgatctgcacccgcttttcagagaggggcccccacccctgccactcaacagcagtcccaagaacaccttccacttgcagaggctggtaccactgtgcgttatggtggaggactcctgtcgccctcccagcaaccctgtgtagtaggtactgccattcacttcatgctaaaatgacaagaccgaagcacagagaggctcatctgcccaccgacagaggccagggacacaagaagtgcccaggcacttctacctccaagagcacttcccccatcggtattttctggaaccttctcatcctcatttgggctcagggccaggggagggacatgggggagccacgttcgccataccaacactgggaagggcacagtacggggcaagcacaggctctgggccaggagctgtggggtcattgccacccaatgcgctgcctgccttccgtaccagctggggacctcacagtgggtgagaggacaggctctgggggatggcctggacgtggatcccagctctgccccttcctgcaggcaacactgggcaggttgtatgcccttcctgtgcctcggtgggtgaggcactagagggtcctatcagggtgaaatgagacactagacataaagtgctgagagcggtgcccagcacattgaggtctcagaaggctgtcatgagagttcacccagccggcctgcaaatgtggagcatttctgtgcaccaggcttgttcagggcactgtggatgcagcaggggacaagcccatcatggctcctgacctcaaggggaggacaagtgtgtagaagctccaaggcgggggccaaacagggagactccttctcagagggcagtcaggggaggcctgaggagatgacgtttaaaccaggacctgaacaatggccatccccagtgcctagaacaggcccttggcacacagctatgaaataaatgaaatggagggaaggaggcaggggattgggagggaaaggaacccaggcagagggaactgcatggcaaagaccccagggcaggagcaagctggggtgtctgtgaaaggcacacaggtgccagaatggctggagccaacagagaggagtggaggagatgaggacagagaggagtgcaggagatgaggacagggaggagtggaggagatgaggacagggaggagtggaggagatgaggacagggaggagtggaggagatgaggacagagaggagtgcaggagatgaggacagggaggagtggaggagatgaggacagggaggagtggaggagatgaggagagagaggagtgcaggagatgaggacagggaggagtggaggagatgaggacagggaggagtggaggagatgaggagagagaggagtgcaggagatgaggacagggaggagtggaggagatgaggacagggaggagtggaggagatgaggacagggaggagtggaggagatgaggacagggaggagagcatgcccagaccgctccggcctctacgtgccaccatgttagagatctgggtcttatcctcagcaccacaggaagtcgctgaagggttttagtcaggggggaacaggctccaaatttctgttttaagtcagtagctgctgtgtgggctacggactgggggcagtgagaggagaccccggcatcctccaggaaagagatgctggtggcagaggagacagaggtaagaaaggtaccagtgctgcgtgtgccaaagctgccatgggcaggccctgcgccagtgccttcatgtttacttcctcctctacaccacatgacagccagggaactgagccccactgagggagagacacggcagctggcctgaatccagggcctggaccccagccctgggccatcctgcggggcaccccagagagaagctcggcgaagcagaggtggcagggctgtccttcatgcacaagcccgtcctcaccgcttcaggagtgacagctgactgtggggactctcccctaaccatcacctccccgacctagaggggcatttacagctggagggcatctggggccctccctgtgcacagatagtctgccttgtgaggagaaaataaattaatatatgaaaagtcctcggaacaggatctagctcagagaatttaattattttttatttatccaacaaacatttactgaacacccatttgtgtgccagatacatacataaatataaatgtcccacttggtggacaggtgctatgaagaaaagcacagctggggaagggcaagacagcgaagggaggcagggcaggacgcactggggtggcaacactggggcagagacctcgtggagtcggggagagctgtgatggcatctcagggaggaaggccttagacaaacgcgacagcaagcgctgaggccctcgggcaagagatgtgctaggcatgtttaaggaacagcaaggagacacgtggctaagtgagggtgcttgtggtaggaaatgcttctggagaggtcgctggatcatacaggactctgcaggacacagcacggaccttggagtttactctgagtgggagtgaaagccattcagagttctaagcagagaaaatacatgataagatttacatcaaggccaggcacggtggctcacgcttgtaatcccagcattttgggaggccgaggcgggcagatcacctgaggtcaggagttcgagaccagcctgaccaacatgagagaaaccccatctctactaaaaatacaaaatgagctaggcatggtggcgcgtgcctgtaatcccagctactcaggaggctgaggcgtgagaatcacttgaacccaggaggaagatgttgcagtgaaccaagattgcaccattgtactccagcctgggcaacaagagtgaaactctgtctaaaaaaaaaagaaagaaagatttacgtcaaaaagatcacagatggccaggcacagtggctcatggctgtaatcttagcactctgggaggttaagatgggcagatcacttgagcccaggggttcaagaccagcctgggcaacatggtgaaaccccatctctacaaaaaatacaaaaattagcctggtgtggtggcaggcgcctgtagttctagctactagggaggctggggtgggaggatcacctaaatccgggagattgaggctgcagtgagtcgtgattctgccactgcactgcagcctgggcaacagagaccccatcaaaacaacaacaaaaagatcatactcacctgatgcactattaagtattcttgcctgccaagaccaggggtctgcaaactttttccatcaaggaccagaaagctgggtgtggtggtttgtgcctataatcccagcactttgggaggtggaggagggaggattgcttgagaccaggagttccagaccggcctggacaacatagcaagactctgtctccacaaaaaaatttaaaaattcgccaggcatggtggtgcatacctttagtcccagctactcaggatcctgaggcgtaaggatggattaagctcaggagtttgagactgcagtgagctatgattgcaccgctgcactccagcctgggcaagagagcaagaacttgtctctaaaaaaaaagttttaaatttaaaaaattttaattaaaattttaaaagggccaattattaaattttttaggctttgcaagacagtctttgtcacaactacttaacccagccacagtaagccaaaagcagccagactattcatgaacaaatggacatggtcatgttccaataaaactttatttacaaaaatggaaggcagggccatagtttgccaaccctgttcctggcctaattctagtttacaagaaatacaaacatggggaacaaaagtaaacaacaccaaaaggcaataatatgacacacccagaaggtgtgacattctacaagacaactagcctggcttgtcaaaaaaataaataaattaataaaaaatcaatgtcttggggaggaaaaaaaaagacaaagggctgaactagattaaataaaacaagtcaaagagacatgtaccttgaatgaatactggttttaaaacaatgttctaaaggttgcatatccttcaaaaggtaactaaagaaattcaagtacggcatggataaggagaagttactagtaaacaaagattataatcatctcaggcgtgacagcatcatgattctgtaggagaaagtccttattcttaggagatgcctgctgaaacactaagaatgtcactaagtatgaacacaagttcaagttcagcataaaacacaaccagatgaagcagacacggtgaatgcgggactgcagagtctaggagtggggcgcgtggatgtccattcattatactattctttcaacttttctccatgtgaaacacgtctgcagtgaagtgggggacagggaggagggtctctccagctggagaggcaaccaggagcccagtgaggaggcgctgcagcacctagccaacaagcagtcaccgactggcacccacctgccctgcaacccctgcctccctccccaggcttaagagaggccagctgacatcagcctgtgtgggccagggctgtgaggacagcatcagtcagccaggagcagagtggagggggcctccctcttgctgggtttctggttcaccccctccacccacccatagttaaggtcagaaatctgggacctggtctcttagtcgttccagcagttttctctttggcaacagcagcaggtaccaagaagaaaaggcaggtggggctctccagcctacagaatcttggtaaaggaaagggcatgttgtcttgtgaaaatggaaacgagaccatctctcctgcctactaaaacaccttgtcagctccaccttgtcagtacctgatgtgccaggtactgctgcatcagccgctcctatttatcattcccctgcatcgtgtaactaccctgggacaaaccgcaatttactaagtgcctgccaagccctgtggggatctccacctggagtccaaggccttggctgagctctccagcttcgagcgcctccacttcccctcttccaacactcctggccccttggttctctggtgacacagaaccccctgtagtctctggaatgcatgagctatttcacctccaggtctttgcatatgctgtcccttctgaactttctccttgctatctccgtggccaaatcctatccagtcttcaaaacccagctcaacacccaggacctatacacccactggtctcgatctgtttttactggccattcatgttttggtccatagttttcaactgagtagcacctcagctggcttgagatggtaattttgttcccctcagtggggcaagtatattttttaccttgggaggatgtgcaacaataattatagtatagattatagtaacaagtctcatgatattgtgggttcctgagctgtactgtccaagaaggtagccactagccatatgtggctctttaaatcaattaaaataaactagaaaaaatccattccttggtggctgtatttcaaatgctcaatcggcacaagcagtcagcacaggcaatcggcacaggcaattggcacaggtgcctactggacagtgcagataaagggcatttccacaatggccggaagttttcttggacggcatgattttagggctctctagagggtctgctgaaaccttaccccatagataagctagaagactgtttctcaaagtgaggcccaaaaggacaaagtgggaaaaagaaacatttcccactgattacaaagggcaaagctccttaatctataaagagctaatacataaataagaaaaagaccaactacccaacagaaaaatagacaatatagacacttcagaataggaactcacatggcccttgagggtcaaactcatccacagagaaagaaaggaaagttaaacaccccgaggtgctgaatttttccactgctcagactggtacaaatccaaatgtttgaaaacacaaggccatgggggcactctcagacatcgcctaatagaaacatcgcaaaaccacaaacttattttccctgtgcctcggcaatcctgcatctaagcactcgtcacacaggtctacctgtgcacacatcaaacgagacagacacggctatttcactgcagcattccttataatgagccaaaggctggaaacaaccccagtcatcacaataaagaacggctaaataaacacacttgggacacgcatgtccaactgtccaaaaaaaaaagcaaaacatgaaacaaagcagctgcatctctccatatatcaaggcaaattccccaaggtacactaagggaaaaagcaagtccagaagcatgtacaatgctaccttttgtatttaaaaaaaaaaaaaaaaaggcagccaggcacaaaggtctccctctgctctttgagggcacctaagaacagtgattaactggggggcagggaggtggatggaaagggcagggtaggggaagctcccactagacacctccttatactgtttcaattttgaaatagatgagtctttatcatctcttctgattactaaattgatctttttaaaatgactctctggaccacctgcctcaaaatcaatagagatgctcattaagaatgtaggtcctgccgggcagggtggctcacacctgtaatctcagcactttggaggccgagggagatcacctaaggccaaaagttcgagaccagtgtggccaacatggcgaaatcctgtctctactaaaaatacaaaaattagccagatgtggtggcacgtgcctgtaatcccagctacttgggaggctgaggcaggagaatcacttgaacccgggaggcggaggttgcagtaaactgagatggcaccactacactccagcctgggcaacagagcaagactctgtctcaaaaaaaaaaaaaaagggggtcaggtgtggtggcttgcacctgtaatcccagcattttgggaggccgaggcaggcggatcacctgaggtcaggagtttgagaccagcctggctaatatggagaagccccttttctactaaaaatacaaaaactaagccgggcatggtggcacacgcctgtaatcccagctacttgggaggctgaggcaggaaaatcgcttgaacccaggaggtggaggttggaggttgcagtgagccaagatcatgccactgcattccaacttgggcaataagagcgaaactccatttcagaaaaaaaaaaaagaatgtagctccctgaccctgggcagatctccaggtagtcacaggtcttgaggcgaggcccagcggtctagacatttcacgagctctgcctgtgattccgatgcacccgcaagtcaaagggcagagtagggtcttcagactaagaaccccagctcttctcagccccagctggagagaccccccaaccagaagcgcagataggaaacccctatgtagggtcccagggaaaatctctccagctgtaccttttctcctcacaccaggcttgctccctctcaagggcagccacacagaggcccagactgacctctcgtctggagaatccacgtggaaggtcctctcgatgactgtggtccactgcaggcagcgtatgacaaaggtgttgggtcgcggcctctcggtcttcatcagctggcattctgcaggcagagggaacagacagcagggggctgaggggatagccctgctagcctgcagcccaaagtgcccgagccacctcccacaggcctagccccatgctagatggtgctggggacactctagggactgagacagccctggtcctgttctcacagggctcagggtctagtgtgtgtgtgtgtggaaggagagaagcccaccagagagtgatggctccatagacagggccgcgatggggacaagcctagaggtgtgcagaagctcagaggtagcatccaacccagcctggggggttggggggcttcccagaggaagcagcttctctgaactaagccctgaaggaaaagggaacttagagggtacacggagaacagacgctcagaggtgagaggaggttcaacatcctcagggggtggccaattctgctccaagggtgaggaggggtaagtgagagacagccctggagaggtgggctggggccagccaggcagggctttggaggccatgggaaagaatctggactttgtcctcagggcagcagggagccatagaaggctttagatagggaagagacacaaacagactgagaatgatccctctggctgccatgtagagggtgaggctggaggttggaaggccagggaggtggggagccagctagggaggatggggccacaccagagtggagccctgcagacaggccatgggaagagggcactgaggaccaggcccaggcctctcggcctgctgtccctgagacagagacaggaatagagctgggagaggcctgaaggtcaggttgggatgtggcacttatgaggaccttgaagacacttggggagatgtgtccaaggagcagcctgggacaggctgggagttctagtgagacactgaggttgggaacagatgtgtcagggtcaccagcacatgtggagagcaatcaggaaaaggcttcatgcagagcagcgtgggacggggactgggttccacagcatggcaggagaggatagtggtctgagctaaggcactggcagtggagatgggggtgcctctgtaatgttcttagcaggcagaacaacaggacatggtgacccatcaggtcagcaaggaaggaaggcggcagaaaggggcagcgatgtggacaggaccatattctccaaggctcagtcaagagcttggggcttgtgaaacttcactgccagggtctggctggaagacatccctttgggtattacagagggacagaggacgcgaggccagccctgtgaccagctgagtgggaagctgtgacccctctacgtccgagggacagaggatggaggctgttaccaaagcacaggatgggaggcacctgccaccagttggggactccaaggcctggctgacagaagctggaaccacaaggaggcgatgcatggggctgggtgtgggcaaatgccctggcttctccctccctcccactctgcatctccccgcaggacagccccgcctggccagctaacaaggagggagagcaggggaagggtgaaaacagatccaagggcaagcaggcccaggacaggcccatggctcaatgaccaagtcccacaagcccctaagacgtgccagccatcctgtgagcaccagaacactgacccactcatcccaagacacacctgctacggagaagttgtttaaggggggtagagtctgatcaggggcctcgggcctctccttgtacccaatgaaggagccgtcgctcttcagcaggaagtaccgtggcctccaggtcttgatgtattcacctgaaatgaggcaggaagggagggagagaggttaggacaaggttgagtgatgtcccaggtaggcggcaggaggcccagtgtgacggtgactcacaaggggtaccacggggcggggaggtgcgggggacacacgagaatgcctctcccagaggagccctccaggtggcccctgctgacgcaggctggggcactgggctgagcccgggtgatccacaggtcatgcctggcaggaaggtgccagcagcagtgccctggggcaccagttgcctcagcgtgtggcaaggagcaagctgtctgtgccagctcctggcctagtcccaggggaggcccaggcttccaaacacacatgccctgtggccctgtaaggccaaatcccatgggctgggattcaccaatacagctgtgcaggtagctccaatgccaaaacacttctgtgccaggcagggtggcactgctgccacaccctcccagcgccccttgactctttccaactgttcttcaccatgaatatccaagcaccctatgcacacaaacacacacacacacacacacacacacacacacacgaacccactcatcagagagctgctaaggattaaaaggagatggtgaaacacatccacacaaaaacttacacacaaatgtcctcaacagcattattcataacagccatcgagtggaaacgaccctaatgtccatcaacaacgaatggataaacaaaatgtagcagattcatacaacggaaaactattcagtcataaaaagaaacgaagtactgagacatgctgccatgtggagggaccgtaacttatgctaagtgaaagaagccagtcacaaaggaccacgtatcattatgactccatttatataaaatgcccagaacaggcaaatctacagagatgaaaagtagggcccggcacggtggcgcacacctgtaatcccggcactttgggaggccgaggcgagcggatcacctgaggtcgggagttggagaccagcctgaccaacatggagaaaccccatctctactaaaaatacaaaattagccaggcatggtggtgcatgcctataatcccactacttgggaggctgaggcaggagactccttgaacctgggaggcagaggttgccgtgagccgagatcacaccattgcactccagcctgggcaacaagagcgaaactccgtctcgaaaaaaaaaaaaaaaaaacaaaaaaaaaaacctgagtatggtgatggatgcacaactctgaacatactaaaaccaactgaactgtatgctttaaatggatgaatcatgtagtacatcagttttacctcaacatggctattaaacaccagcacagtggctcccacctgtaaaatcctagcactttgggaggctgaggcaggcttaagtctggagtttgagacgagcctgggcaacatagtgagatctggtctccacaaaaaatgttttttaattagccaggagtcgttgcgtgtgcctgaagtcccagctactcaggaggccgaaatggcagaatcacctgagctcaagaaattgaagctatgatggtgccactgcagtccagcccagtgacagagcaagaccctagctcttaaaaaaaaaaaaaaaaagcatttacaaaagcctccaaaaaaatacttaaccaagggggtgaagggcttgtatactacaaaacattgtttaaagaaattagagatctacataaatgcaaaaacatcctgtgtgcatggattagaagacaatattgttaagatggcaatactacccaaagcaatatacagattcaatgcaatccctatcaaaattccaacaggctttttcttttttcagaaatagaaaagccaatcctcacattcacatggaatttcaaagggccccaaagagccaaaataatattgaaaaagaaaaataaagttaaatactttccaatttcaaaatttactatacaaagctatagtaatcaaaacagtacagtttatacaggacagacatacagaccaatggaagagaattcagagccaaaaaataaacccaaatatctacattcaactgattttcaacacagatgccaagatcattcaatggggaaagaacagtttcttcaacaaagagactatattttttcaaaacgaaagaaaagaaacctagaagaaaaaatatccttacaattttttttgttaatttaaatactgttccttgcagagcagggaacagtgacccataggcaatgtgcccagagtagcctatcctcacaatcttatccctattttgcagatgaagaaactgaggcaactggatatccacattcaaaagaatggatatcacattcttttgtgatatcctacttcacactgtaaaccatatacaaaaataaactcaaaatgaattgacctgaatataagagctaaaactacaaaaaaagtctaagaatacatgagtaaatctcattactttgaatttggcaatgaattcttagatgacaccaaatgcacaagcaacaaaaagaaaaacttcaagtgaactcatcaaaattaaaaacctttgtgcatgaaaggacactgtcaagaaagtaaaaagataacctacagaatgggtggaaatacttggaaatctaataagggtctattaaccagaacacataaagaactcttacaatgcaacaacaaaaagacaaactgcctgattttaaaatgagcaaaggactcaaagagatattcctccaaagatacacaaatggtcaacagaaagatgaaaagatgttcagcatcattagtcatctggcaaacataaatcaaaatcacgatgaaggccgggcgcggtagctcacacctgtaatcccagcactttgggaggtcgaggcaggcggatcacttgaggtcaggagttcaaaaccagcctggccaacatgatcaaaccccatctctactaaaaatacaaaaattagccgggcgtggtggcacatgcctatagtcccagtgcttgggaggctgaggcctgagaatcatgtgaacccaggaggtggaggttacagtgagctgagatcgtgccactgcactccagcatgggagacagagcaagactctgtctcaaaaaaacaaaacaaaacaaaaacaaaaaaatccacacacacaatgaggtacaactttacatgcccaaggatggctgtaatgaaaaaaaaacaagtgttggcaaggatataaactgacaccctcatgcactgctggtgggaatgtaaaatggtgcagctgcttcttcaaaaagttaaatatagaatatatcaccccgaggccgggcttggtggctcacgcctgtaatcccagcactttgggaggccgaggtgggcggatcccaaggtcaagagataaagaccatcctggccaatatggtgaaaccccatctctactaaaaatataaaaattagccaggcatggtggcgcacacctgtagtcccagctactcaggaggctgaggcaggagaatcacttgaacccaggaggcggaggctgcagtgagccgagatcacgccactgcactccagcctggtgacagagtgagattccatctcaaaaaaaaaaaaaaaaaaaaaaaaaaaaagaatatatcatcccaatgtccatcaacaaattaacagataacaaaatgtgatacatctacaacatagagattattcatccataagaaggaacgacatattgatatacgctactacatagaggaacctcaaaaacattaagcttagccaagtgtggtggcacctgcctgtagtcccagctactctggaggctgaggcaggaggatcacttgagaccaggaggttgaggctgcagtgagccatgagccaaggtcccaccactgcactgcagcctgggcgatagcccaagaccctgactcaaaacaaaaaatcatgttgctaagttaaagaagccagtcacaaaaggccacatatgattccatttacatgaaatgtccagagtaggtaaattcatagagacagaaagtaaactggtggttagcagacaccaggagacagggggtgctatgaattgaattgtcccccaaagttcatgtgttggaaacttgatccccaatgcagcctcatgggaggtatttgggtgaagggagcaccaccctcatgaatggattaatgacattatcacagagtgggttccttataaaaggacgagttcggccaggcgcaatggctcacgcctgtaatcccagcactttgggaggccaaggcaggtggatcacctgaggtcaggagttcaagaccagcctggccaacatggtgaaaccccatctctactaataatacaaaaattagccaagcatggtggcacacgcctgtaatcccagctactcaggaggctgaagcaggagaattccttgaaccaaggaggcagaggttgcagtgagccgagatcgcgccacggcactccagcctgggcgacagagcaagactccatctcaaaaaaaaaaaaaaacaagacaagttcagccctgtcttgttctctcttacccttcccctttcaccatgggacgtgtgacaagaagatgccaaccctgaatctcggacttccctacctccagaacggtaagaaataagtttctgttcattataaattacccagtctcgggtaatatgttatagcagcacagaatgaactaagacataggatacaaaaactgactgcttaatgggtacaaagttttattttggggtaatgaaaaggttttgaaactagatagaggtagtggttacacaacattgtgatatactaaaggccaatgaatcatacacttcaaaatggttaatctcacgttatgtaaatttcatccccgtttttttttttttaaaggataaaaactaaaaaaaacctcatctgtgttactggaggttaggagagcggtaactgcttgggaggagcacttgggagagcttccggggaccgtcttattctatttcttgaactgtacactgggattggggcgagtttattatccaggcatttatctgtggcctttcatactttggtaacaagctaagaaaagaaacctaaaagctgaacgcagtggctcacaactgtaatcccagcactttgggaggccaagacaggagactcacttgaggctaggagttcaagacccacctgggcaatatagcaagaccatatatctatgaaaaaaaaaaaaagacaaaaaacaggtagaaggaaaaatatcctcacaattgtattcctattttgcggatggggaaactgagtcacagagaggtcctattagtttgcccaaccttcccagctgttacctgggagagccagaattggaaagcacagcccacatcttgactactataccgtctgcctctaaaccggcagatggagcccagcatggggcgtggcagagggcaggtgctctgctaatggtggtgtgctgcagctgtgtcagaagtgggaccagcacatggcatgagtgactctgattagatgtgctattactacacccttggccttaagcacagcttgctgggtgagaggcagcacgtgggccaggccttgagagcactagttcaggagtcagagggcctgagtccaacctcagctctacccactccttgctgaaacctcaagcaagtcactcttcctactgaaccttagctttccagtctgtaaggtggcatgtgctccacagggcatctataaaaattcaacaaaatcaggcttgcctagagcagagacaggtgtctggcacacagtaagtgctcagtaaaccagcactgccattattttaaccaccaagggggtcggtggggtggtacaggtcccaaaacagcagtagtcagcagggcccacctcaccttgcccacctctgccagctgctactcagaaagatgggcactgggaaggcccaagagtgcaggtgtgcacaagcgtgtgtgtagggtgcaaacctgagacaggtgtgtcagagctaggccatcccagatgacagaggcaggcctgtggctgggtcatctggccccttgtaacatgaatgcggacactgaaggcccaagaggggccaagactcatttaatgccatcagtaatcctagaccagagagaaactcttgcccctccaacagttccacacccatcccaaggctctcacagtccagcctaatgagccatggcctccgcacgtgcaggccacgggacaggagcccatgaccctgtgttccccagcacaccacccacacaccacgccaaccattcattcaacaaccatttactgagtgcctactgtatgcccaccacttttagacgtgctggggataccactgtgaagaagcctcatgaaaatgcctacccttgtagagctgacaacatcagagatctggcttgttaacccactttatagatgtgaaaccaaggctcagtgaggtgacatggcttgctcacagttgcactaagaggaagcagcagaaccagggttagaaccttgatagctgccaagactcaggaagctccatcaacaaacccagactccaggctcaggctgggggactgggccaagggaccttaaaagccatctctgtccagaaagagcagcaggacacgaatctcctctgctcagtcaggtggggaggctgctcccagggaggggcgtccatccctcatcgctgctccctgtctgcgtctgcaggctggtacagtgcaggatgcgtggctcttcccgatgcctgcagcgccagcttcctgccccctctttgaacaagcccacttaccccctcaggactcattggctgtcgcctctggcataactgtgaggctcaatccccgatttccttcaggcctttattcagatgcccccttctcagcgaagccccctctggccgccctgcctgcctcatgccctcccatcctcacgttgcttgttttttctccatggctcgcgccaccgtgagacatgcatgtctgcctgggagctgtctgcctccctgtcagcgcccaagatactaacacgaggatgggatgtttgcctgtcgggctcactgctggaccccaggacctagaacagcgcctggcccacaggcgctgctcagcacgtgtttgctgaatgaatgcaagtgcacacagggcagccaaccgccacacctggggaccttctttccagggggaggcccacagaagctggcctgggacaaagccatctctcagcaggtggcgcttctccccatctgcctcccagtcttgcgtggcagccactttgggacaaacagccctggggtcaaaaagggtctcttccctgtcctaacttcactaaaaggggacctcagcttcccactagtacaaatggatcaggccacgcatcggctcacgacatcacagggctgctctcgtctggagtgccaaagccaaggtccttttccatgacctgcaggcgcgacacagctggactccgcgttgctcctctgcttgcctcccccagctcgccctagctcacactgctccagccacgctgttaccagaaaacaccaggcacatccccacctgggagcctctgtccttgctgtccctctccctgggacacccttgcccagccagcgtctcacctcctccaggctccaggcctctgaccactgccgtctcctccgggcagcctcttgatgcccccccgcccccagcccattgtccctcactcacagttcccacttttcaccccagcacttgccaccccgacattccatgtctacttatttactgcctgccccacccccactggaatgtaagctccatcaggggaccactgtgtctcggagcccggggctatccggcacagcacacagtcaatgaatacttgctaactgaatgaatgctgaatactgcctcactgtgttagttcagtgacgtgacttcccctctctgggcctcagtttcttcatctataaaatggggctatgaatgagatcactcatgcacagtcagatccctgctctcctgcccagatgaccactgaaggagtccacgaaatgggggcataagcagctgtgggcctggggctgcggaatgctggctcctcaggctggtaagaccctccgcctctgcctctcagggcacagctttccaggaggagccagcgtgggagaaagaatctggcgggcaaaagcggcctcttaccacgcttgtggagccagccttctttgatgacagacacctcattcatggtggcagcgtggtacgctgtcacctagctcgggacagctcagggcagcaggacatgcaggaggcaccgtggacagggcacagtctgcaagacaagagaggagctggtcagggcgggaggggattccacaccagccccttccctgaggacgccgggctctgaggccctctggctgttctgcccactcagcaaagggtaaggccagcaagggtggcgtggagcccgctctcaaggacccattctgagcagagagatgtggcaatgtccccagcgaccccaatctgggggaagcagagctccccggcctaagcgcaggccagaccccaaactcaggacacccatgctggggggaggtggcccctccacccacagtcactcctgactgagcaagcatcaaggtagccgtgccctgccctccccgtgtcattcccatggcccaacactgaggtaacccagtatgaatgaggcagcccagggtacctgagggaatgcgcagagccaccagcatctgcctgtccctccaccatcttacacacacacactcttttctctctctcccctctcccttctttccaaaccaggaagccaccaacctgccaccttcaacaaactaagcacactcccgtccccccatgccatcccatgccattccctgagcctcagcggcctccctccccccatcagatgacagagaaaagacaggtctcagacaatccgggatcttgaacaagaaagcaacctactgcgtatgcacggtctggggcctagaagccagtcctgggggcttgaccgaggccctgatccctaccccaagaccttcacttctgtcctcagggaccagcaaccaacagactgagggacgccgaggccactgcttcgtctcaggttcccagaacggaggggaggagggcgcgaggcagcgccagctgggcccctacctggagcctggggcctggccagggtccacagagaccaaggcgcctttgcctttcccagcctggggttatttgcggacagcaggtcgggagctacggtggcgcccagagaagtggcagctggctctagggacaccatgggcatcagctttctctcgtgccccaggggagctggtgggccggacacgctactgcctggcatgtgacagtggcaggctgcccaggtcccggcagaaagaagggaggtaagtggtaggaagcgggaggaaagacaagatggacatgacagggaagtaaacaagagggtgagaaatcacattctgggctccaagctgcaaaggcaatgatgcgaggctgggagcagcaataaggggctccccttgccagcaacatgcccggcaccccacaacccaagcacacaggactgccagactctcaatcctcagcatccccacatctcggccgggcacaatggctcatgtctgtaatcccaacactttgggaggtcaaagcaggagaatcccttgagcctaggagtttgagacctgcctgggcaacgtagtgagaacttgtctcacgacctaatttttttctacaaaaaaattaaaaattaaaaaattagccaggcatggtgctgtgcacctgtaatgtcagctattcgagacaggaggatcactcgagcctgggaggtccaggctgcagtgagccttgattgcaccactgcactccagcttaggtgacagaatgagaccctgtctcaaaaaatatataaatatgtatgtatttctgtatctcccactgttctgtgtgtcaacctctaacgtgaccatctctccccatcctgcccgcggcctggctctagtcaggtctgcccccatctgcccccacctcttccccgagttcctacgctccactcttgctccctcccactcaccccacattcagcagctagagggatccccaacgctgaacctgtctttctcctgctcagaacctttgtggctccctggtgttcccagcaaaaaagccaaactcctcagctgaggatccaaggcccttcaggacctcgcctctgctgccctgcgttccaggtgcatgagctgagacgtgcacctagaaagccctcgggaaaggctaaggaccatgacgttgactattgcacctctccagcctctccgccctacctgactctccatgttatgcttctgtcactcaagcccttccctctggcctccatcagggacagcacctccttctgggcgttcttctctctcttccttgaggtctcagctaaaccagtgcctcctccaggaagccttccccacctcagaggctgcactgtgtgctctttgtgcaccctcggagcaaccctcccaacacctattaacgctaatgcagtagaccagcaaagcgtcttatctaatgagcacatgaagaaagaggccaagtgtccccaactgacccccaccccaggaccacacacagccagggacacactaccagactctcttcatgacaccaatcttttttggggtgcatcctagaccccggatggtaccagcaacagaatgtcactaagacacagccctgccttcatgaggctcacagtctggtgtgaggggcagaaaaatacacgaatatgcaaataatcaggtggtggggaggctggagagtggaagaacaggatgttagcttggtgtgcgggacttgcgagcagacacccgagttaactgagggagtgagctgtgtaacacatgaggaaatgtatttcagcaggggaacagaaaatgcaaggacctgaggcaggagggggcctggtgaggagaaacacgagagaggtggacaggggagaacaccaagggccttctgggctatggctgggactgagagaagcccgtcccctacacggacctacaccacaccttccctgatgcaagctcagttcaaaatacttcccaaatggctgggagggagaactcagagtccaaaggaggggctgatgtggagggaatagaacaggggctccatgtctcatctcccctctcgctggcccacagcggcccagggacatcgcctctcagggcccttgtaatgcagcagcactaaagtacccactgtgggcccagggctcggcctactgcctggcgcccagtgaacagccaaacacatggctgccattattccagagagaagcaaaggcagccaggtatggccaagagtggtctgggttccagagtccaagagccaccgccagctgggtggccttgggcagggtgccggcgctcccatggagtctctcctgaatgctcccaacaccccaccagacagtcagtgaccatgcccagatgaggacagaagctgagagaagggaagctgtttacctcgggtctcccagccgagaagcagcggaggccctggccgctgctgggatcaacagagctgctttttacaagctcatctcagcaactaaggagtcagcacagctggagggagagcagggggaggagttggaagatcccctgcgtcccgcctggatcctgccctgtcctcccactgagggtggtgcctcagctgaggtgtccgtgacgcagtcctgtggtgatgaaataccagccactgcagccaagaagatggctggcttaggccgggcacggtggctcacgcctgtaatcccagcactttgggaggctgaggtgggcggatcacctgaggtcgggagttcgagaccagcctgaccaatatggagaaatcttgtctccactgaaaacagaaaattagctgggcgtggtggcacatgctacttgggaggctgaggcaggagaatcgcttgaacccgggaggtggaggttgtggagagccaagatcgcgccattgcactccagcctgggcaacaagagcgaaactacatctcaaaaaaaaaagatggcctgatcactcggggggctgccaatggaggacactcaggcagggggacagagactcgcctatggaacccccatagcacgccctgcggaggggagtccctgcacggccccaccacactcattacttcctaaggttcctgggcatgagtcttctgagtgcctgggccagagctgcagctgttgactcaagacaaggtaaaaagagcaagagcacctcacaggagaggacacccacacaaccaagaaacatacataatctcattagttacaggcaaatgcaaatcataaccacctacctgggatggctcgaattttaaaaactgacaaggccaactgctggctcggatgtagaggaaccagaacccttactcattattggtgggaggtgcaaaatggttcaactactgtggaaaactgttaagcagtcaaaatcaaagctcaatatatgcctatcccacgacctagcaattcgtctcaaggaaattagtgtatgtacaaaagacttgtactacaatgttgacagcagcaatattcacagtaaccccaaactggtaacagaccaggagtctacccacaagagaatgaataaacaaacacgtagatccacagtagaacactactcagcaacgaaaaggactaaactgctgctgaatacagcagggaaggagtgagagaatgttatagagtgaaagaagtcagcactctgcccacgcccctcctgcagcctggagccccgtgaccacctgagtcagctcccaccccttctccgctcgaaccctcccatgcaacataaaagccaaaatccccaaagcagccccaggaccctacgcggcctgcaacatccccctttgcttctctgagggcacttcacttcagcagtgcctggctccctcagctgccaggatacatggggacgccccacctcagggccttgcaggcactgcaccctcaggtggaaactcaggcccctctccactctcttcagcctctgctcacgtccctttcttgagaagccttcctaacctccctaggcaaagcatgcccaccctacctccccttacccttacccttcattttcccctaagcacccatcaccaccgatgttactgtatgtgtttgcttacgctgacagcccaccacccacactggaatgtcagcacgacaaaggcaggactcttggctgccttagccacagctggatccccagagctttgtagggtgttgggcacagagtggagtgggtacttaataagtatctgtggaatgaacatgtacagagtgaagccctgtgcccagaacaggctcaaaataagctcaattcctttccttgccacttactaagtcctttttctctcgccccctctcactgacctgattttgatgccagacagcacagatgggctagggaggcaggtggggaagcagagatctgcgtctcttggagctggagctggtgggtggggctccttcctggtgctgcggaggctcattggggaggtggcagcgaccccctcaggagcctctgtcgcctgcactcagatctgtgcctttccacagcgcccggaggaagacttgctcaggagataaattcaaagacaacaggaagctggacgtggtggctcacgcgtgtaatcccagcactttggaaggctgaggcaagaggatctcttaagaccaggagttcaagaccagccttggtaacatagcaagaccttatctctacaaaaaatataaaaattagccaggtgtggtggtgcacacctgtagtcccagctacttgggaggctgagccaggaggattgcttgagcccaggaggttgaggctgcagtgagctatgactacaccaccacactccagcctgggagacagagcaaaactgtgtctcaaaaaacagacaaacaaacaaacaaacaaacaaacaaaaaaagctggccgggcacggtggctcacacctgtaatctcagcactttgggaagccaaggcaagaggatcctctgaacccaggagtttgagaccagcctgagcaacatggtgaaaccctgtgtctgccaaaaaaaaaaaaaacatacgtacatacatacatacatatatatatatatacacacatatatatgtatatatacacgtatatatacatatatatatatatagtagtcaggtgtggtggtgtgcacctgtagtttcaggtacctgggaggctgaggtgggaggttgacctgagcctgggaggtagaggttgcagtgagctgagattgtgccactgcactccagcctgggtgacaaagccagaccctgtctcaaaaaaaaaaaaaaaaaaaccaaaaaacccaaagacaacaggaactagtggtgtaacaggcagcatctgctcatgggaactcaggagaaaggcacctggggcaagacgtgagggaaccaactccctcatctgccaccagccattcaccactctataaactggtcccagcgtcttgtgagaacattctggtaaaactcataaagtggaaaatgtacatgtgcttggaggaatttctcctgcagaaaatgctagtgccagggcacagaagttctaagctgggaattctcagcctcaacactagtgacatttggggatagagaatccctgatgtggggactcttctgcaccctgaagaggtctggcagcatcctgggtctctactcactaaagccaacagaacaccttcccctggttacgacaatcaaacatgtcttcagtcatcaccaaatgtctcctggggtacaaaaccaccaccagctgacaaccgctgtcctaagtatgtactgctgaaatagggaaacctggcaacaatctaaaagctcacaacaggggtctggtgctatatattggttaatatcatgactctactaaaaagagcaaggctcacatagcccataccacgtgccaggcccatttgagtgcttcgcacataccaatataaccctcacagcaacactttgaggcagacactcctactgtttctatgacaatgaggaaactgaggcacagaagtgaaatgacttgccctatgacttcatctcaggaagtacaggcggcctggctcccccacaacaccatgccacacagccttgagagttaggcagatctggactggggtccttgtttgcccactttctagactcccaagcctccgtttcctcctgtccttgcaaggacagacagcagcgctttcatcacaggctaatgcagggaagggctcagcacagcacccagcacgtggagacggtctggccacacaacacaacaagccatcctgagcacagaaacacagaaaccagccctgctgtgctgacactgggaccatcagcattcgctaacgaaggctcgcggcacgacagaatgcaggcgggatgccttttctgaaacgcacacacacacgccctgtcacctcaattctacaatatgcgtattgtttcacatgctgatgtcattgagattggcatgtaccttgcaatccatggacaaaactcacctatcgcattcttttcagaaaagcagttatatgatcaatgatggaccttatagggcatactgtcttagacttcagggcacggggaggtatgtgtttaaatgtcacacgcacagaaaaaagaaatccgaaggaaatacgccacactaagaggcaggagagtgggtgcgggaggcaaggcagcctcaggaaccaaatgccagcttttcagccctggctgtgtcacctgctgtgagaccttgggcaagtcaccaagtcatgttccctttcttcacctctgtttcctcatctgtatattagagataataactgcatatacctatctctaaggctattggagggttcagtgagttaatccacatgaagtcctcccaaaagagcctgtaagagcaactgctcaacacgtatcaaatattatcatcactggccaggcgcggtggctcatgactgtaatcccagcactttgggaggccgaggcgggcaaatcacaaggtcaggaggtcgagaccagcctggccaatatggtgaaactctgtctctactaaaaattcaaaaattagccgggctggtggcaggcacctgtaattccagctactcaggaggctgaggcaggagaattgcttggacccgggaggcagaggttggagtaagcagagattgcaccactgcactccagcctgagggacagagcaagactccatctcaaaaaaaaaaaaaaaattattatttcctctgatgggtggagacatgggaaacttcactttctatactgtatgtttctgaacaggtgaatttttacctattctacctccttggtgagaaggtggcactgaagaaacttttttttttttttcctgaaaaggtctgggtacttcaaaaaaaaaaaagagagagactttttgtttcttttttcttttaaacacactccctacactcgccccatctgtctgcttggagcaggtggggctggaggcaggttgaagccgtgggcaggctgcaaaagaaacggggacaagaataagcacagagcagattccttctcctccctgccaccccacacacacaccttccccctcacgccacccagggccttacagcacccacagaaatcatgtcaaatattctagtctgcttggccacgggctccatacactctgagggctccatgctgcaaccagcgggatcctccacgcagttctgaccctgtccctcccctgctcaggacctctccctagtgcccatggatcacgtccaaggcccctatggaggctgccaggggccatctgccttggccccgcctgctctccagcctcactggtctgctcgctccaacacacaatctccccttctcctggccccatgaagactccctgctctcacaccccaagacctttgcacatgctgtaccccttgcctggcactctgttcacccatcttcttcacggaggccttccctgaccacccctctcccacgagcagcggactctcagagctcagccttcccttcccctcacagcacttgcctctgtcacctgcatgactatgtgggtaatgtcgcctctcccactggactgtgggttccacaaggcagggatacagtctgtcctagcccccactgtgtccccagctccactcagcacagggatgggcccataactttcattacttcaggggggagtggtgaacagaaccacagcatttgtgccaagtgaaggtaaaacaaaaaatcctgcattcattcattccacaaatatcacaacaactctgcatcatcactgctcgggtcaccagggattcagcagtgaccaaaacagaactccctgccattggggagttgggggaatgagggaacaggcagcaaaataaaaaataaatacatacgcaaattagacaggatagccaaagctaacaaatgccatggagaaaaggagcacacggaagattcagtgcagggaaagggagcaggggtttccgactatacacaggatggtgacagaagggcgcactgaggcagcgcagtctgagcaaaaccggaagcaggtgagagagccgggggagacctggggaggaacgctgcaggcaggggaggagcagggctgaggcgcgttcgaggcgcctacaggagtgggtgaaggggagggccgggagatgtagctagaggaagctggggaccgctgggcagggccttgggggccactgtcagcattgtggctcttatttggagtgagaggggaactatccgcctgaggcgagctggggagtgggggaggggcagcaggtggaaccccttgcacccagggcagggcaggagtccttagggaggcagcccttcctctccaggagctgtccccagaataagccctgggcactggcctgatgggctcaccacctgcctcacttgagaaccatgaggacctgcatgcagcagatgtgaaaaccgaggatgggagagattcggtgaatacccacagcgagagacagcagggacacagccaaggagcccggacccctctcctccgagccctgagctgcctccacctccttctgcctttgctcccaagagacagggccacctcccatcttgtgtcgcctcctcccacaccccggccagcccttccttaccgcccctgatgtgcacgcatgcacgggagccctccagttggactgcatggggaatccctgacccacgtcgctctgcatcgccaccacctccctgggagctccagggcagggcccagtggcaaaaggagaaaccagtgggtctgcatcaaggctaatactcagtgagcactcacaaagcaccaggcatggattaatgttcatcttcacagccagcctgtgttactatccccgttcctcacatgggaaaactgaggcccagggagagagccacatgcacacagtcacagcgagtaggtgcaggagagggaccgcaaccagagcagaactagcccacagacctttccataacgacagaaatgtggttactaaatgtttgaatgatggctagtgcaactaaagaactgactttttacttttctttaattgtaattaattaaaacttaaaaagccatatgtgagtccgggcacgatgactcacgcctgtaatcccagcactttgggaggctggggggggggggggtgggcggggggcgatcacaaggtcaggagttcaagaccagcctggccaagatggtgaaaccctgtctctactaaaaatacaaaaattagccaggcgtggtggtaggcgcctgtaatcccagctactcgggaggctgaggcagagaatcgcttgaacccgggaggcggcggttgtagtgagacaagatcacaccactgcactccagcctgggtgacagagcaagactccgtctcaaaaaaaaaaaaaaaagtccatacatggctagtagctaccattctggagtgcaattctatagaattcctgctaattaagcaccgggagcttaaaggcaggaggcagggatgtgactctcacaggcccaagaggagccagatcatcccagtgcggctggaagctcccatgctataccccatctctcccgcaccccaacgcagcttacctggggaattggagcaggactcaggcccaaactcacacctctagtcaactcaaatcctgactctaccacttccaggctacacaggtcacttctctgaacctcagcttccgcatctgtaaaatggaatctttttttttttttttttttttttttttttttttttttttgagacagagtctcactctgtcgccaggctggagtgcagtagtgcgatcttggctcactgcaacctctgcttcccaggttcaagcaattctcctgtctcaacctcccgaatagctaggattataggcacccaccaccacacctggctaatttttgtatttttagtacagacagggtttcaccatcttggccaggctggtactgaactcctgacctcgtgatccaccctcctcggcctcccaaagtgctgggattacaggtgtgaaccaccgtgcccagcctgtagaatggaatcttaacaccaatctgcccaagcacatgtttatgttatctcaaaagataatttttgcaggccaggtgcagtgattcacgcctgtaatcccagcactttgggaggctgagggatgtggatcactggagcccaaaagttcaagatcagcctgagcaaaatagggagactcccatctctactgaaaattgttttaaaaaaattagccaggtatgatggtgcatgcctgtagtcccagctactcagaaggctgaggtgggaggaccacttgagccagtgaggtcaaggctgcaatcagccatgatggtgccactgcattccagcctgggtgacagagccagaccctgtctcaaaaaaataatgaaaaatttaaaaagatgatttttctgataaccatgggttgtcctggggacccaatgagatggcttcacacacagctggggacagggccagtgcttgaaaaataggtggcaattacataaaggactctgacatcaggggccgtcctgagcctgtcagagccatgcagtggcagctaatgttactgctgtcactacttggttctaaaggaatcatcccaataatttccaacatgcccctactaactttttgaaaatatcatctaaatgaaaacacacagctaaaaagagtcaatgccctgcagacacctcctcccacccgccaaggccttcggacaccagtttgagaagctgggctctagggcgccctgtctccaaagcagaatatggtctgctttctccatccctggctgccacctgaatccagccagctctctcccacacaggtccctccccacccacctgtgtcccttctctttggggataaagccctggatccccatcatagcccaggccctgagccctgccaccctgctctctccccctcacccactcccccggctccagctacatgggcctgctgttccaccagcacatccagatatcgccttccttgcggcctttacctggctgcaccccgtccagcccacttcctcgggctctcacatcacaggggctcctcagcagccttcccaagcccctctcccacccagtccagctagatctctgttccctccttcagccacaccaagcactcacaggccaatgcaacctctctgccacctccgatcgcatccagaactacacgtggcacatagaagtgattcaatcaatatttggagacagatggaacacacaaatgaccaagaacagccaaaggctggctcctgaggctgttcagcaatcaggcccctagggcagtggggagggggtgcctcccatcctcatctcttccccctgggccccccttgggaggggccaaggtcatggtattgggggtggagagaagcagccacaccccacatcccaagcaggcatggaatggagtcatttctggattactgaggcctactttgtgccagctctgtctaggagaagagaaagcagaaaagaaatcatgatgacaacagtgacaactccagtcatagcaggcagggcaagaagatgaggctgtcttcaaaaggcagcttcgccgacagagcagggttcaaccatcatgcctattactgacttccagcaaatccaataacctctctatgcccgtttcctcccctgtacaacggggacgatcgggacagcgagctgccaggctgtggtgaggatgagtgagagcagacaccttaagctctgcagcagtgcccagcactgagaggcgaactactcacgagaatgaccccaatattctatgtggcttcctgggcctcagtttcctatctacgagatgggagtgctaacactgcccacctcccaggctgctgtgcaggtttgtagagctaatatgcagcgtctggttgggcaggagtacagtggtgggagtgattcacattcctgtctggagccctcccatcagctaacaggccctaccactctctcccaaggaccaacaacgagcctgtgcccactgccctgcagagccccttctgtgctctcaggtgccctcagtcctgtctggcaatcaccaggagtagcatcagcccaaattcatcccgccgcctcctcaggaggcctgtgctttccaacgcagcagctccgtgcatcctccccaccgccccactcagcaggaaggttcccgtttacagctgagcaaaatgcaccttagggagaagaaataaggccccagagctccacagccaccgagaggggtgccaagagcagggttctcacccacgtcagctacccccgggaccaggtcactcagcagccccagctgggtaagtgtacaccaaaaacccaccagaccatgaagaacttgaagccaggctggagaagagaaccggggagcggcaactgccccagcccattcggaaagggcccacaaagtggcaaaccgaggaagacttgggtttctggcctcacccttagaaacaacatctgcgaacgagcttctccagcaggacggctgggctgaagaaactcctgctgggacctctgacatgcagtctcctcttggccgacccggcttgctgtccctcgctcggcacagtcagagcacctgggccctgctgtgggtgccgagttggcagtgggtcctgccccaagggggccaggctgagctcccacccagcgcccctcccacactcactccctccctcctggtcctgctcccaggctgtctcccccagctgggcctctcgctgcttggctggctgtccagaagagcctgccatggaaccaccccaccgtgcggcccggaggcctgtggttgagggccttccgctgagagctctgggaagctgaagagaggcccggggaggggtgaccctgggtcctccaggggcttggagctcaagtctgaaagacactcctttccatcccaacccatcccgggggccttctggagaccctagtggtttgttctgaggggttctgctccttctaggaagataccctggaacacacctcaaaaaaaaaaaaaaaagccagagcgcctgctcccgcaccaagccttaggggtgagcccatgggtgggatcagaagtcacactcaccaggggctactgagctgtggtgggggaatctctggaagcccagattcatagcctgtccccaacacttcctggttgggggactcagcacaagctacagaggctctccaggcttcagttctcaccacttgtaaagcgggaatcagagaagattcctcctgggtctaatgggtcttcacccagatcctcccatggctccctcacagcactccagtccctacccacacgtcacctcctcagggaggtcctccctgatcacccagctatagtggagaaacatgcccacactctcaacctggccctcatttattttgccttcgtaatatcaaccacacctgagcccaaccagagacctgggtgctgggcgccagtcacaagccctggtctttccaattccagaggagcactgggaatggcgcaggcctacaggcccacggcagcgtggacgcagggtcagcgggtgctgtctgtatcaggtgtgactgctgccctgcgttgctattcagtattagtccggctggttgggttggggaggaatgggcagagaaatcagcccaatgagcctcccctcctctttccctaaaagtaacagccacgggctctggagaacacggtgtgaaaaccacaggagggaggcaaccctcaggcctttgctggctgtaaggcagtgatgctactggaggggaagtgggaggcctgtgaaacgccctgctccgctcagtcaaatctacccacgcccccaggcaggagcctgtgaccggctcctgggtcacctgctaacaccctgaatctgaccaggctgttcctgctgaaattccaaactccttcacagacagtccacaaggctcccagtgaaagggccctgcctgccccgcagccccaggactcatctcctccctgctccctcgctctgccaagccacacaggcctccgtgaggcttgtccctgcacctcaccaagctctgtcctcccttcagacctttgcactgtggttccctccacctggagggctgttccttctcctcccatcccacatgactgcctcaccttgccaaactgggatcagctcagaggccctccccacagccgcatgcatctaaagaagtgcccagtctgtcacctgatttgaattcgctgcctagctcctccccctctaaccggctccttgcttattaacctgtttcgggttggtcttgcttagccccacaaggatagggactttggcaagtacactgctgtattcccagtactgatgcaacgctggcacatacgaggtgttcagtaaatggtggcggatgagtgaaaccttttcctcggctccacaatacccttaggatccatcctcacctctcacccaggcccacaggccagtgcagcacagcccctgccaacccctgcaggcacttctgctgctccccctgcccaggcccagccttcctgccactcccagagctgtgagctgtggtgggctgggaaccaggggcagtggcatgcacctacggtcccagctactcaggagactgaggcaggaggatcacttgagcccaggagttcaagactagcctgagcaacatagcgagactcccgtttccacaaaaaatttaaaaattagctaggcatggtggcatgcacctgtagtcccagctactcaagaggatgaggtggaaggatcactaaagcctaggaggtcaagcctgcagtgagctgtgatcacaccactgcactccagcctgggtgacagagggaggccctgtctcaaaagaaaaaaaaaaacaagcacagagcctgacctctgaaaagactccagtgtgtctaccttggaggcgctcagggctgcaaagccactgcgtggaagaggagtgggcccgggagctgcccttgtcagttctgacttgattgcatgtctcccccgacctctgtttctgcatctgtaaaactgagatgctaatttcagccctgatctcctcctagtgctctctgacacggttctgtgaactggcaaaggccttcaaagtcccggcagaaatactaagaattacaattgctaagacagaccaacagctcaccatgtgtcgggcactgttcttagtgaggagacatttccggtaggcttattgtatgccagaacagttatgaatgcttcccacaaattaatccactcagccttcacaataatcctatcaggtgggaattatcatcatccccatggcaccgatgatgaaatgagctcacaagggttggggagcctgctcaaggtcacacagccatggagtggcacggctggatttgaaccctgtgctctcactcgcttccatacacctctttacagaggctggaaaccagaacattgaagttctggatcctagctgggccaggctggggagctggatcccggaatgctcgaggggaccaaaagtagggggtgggggaggctggatgcctccgttccataacataatcatgactgccaaccaagacttacacagtaccaggcaccattctaggagcttctcgtggattaattcatttaatcctcacaacagcccaaggtggacgtccttctgagaccactgtatgggagtgaacagtgtggtccaaggtcgcagagctagaaccgacttcaccgtcctgctgctagctaacgcaggtccctggtagctgtgtcaccccctgcatggctctcttgctgtcttcttctcccagcacacacctgcccagggttaaaggatgccttgcctccactctgaggagggaccaagaaatgctggactggctgtaggcagagatgctcagggcagcctgaggctcaggggtaagaggaaggaaagacataggacagtcacctctataggtagaggacagaggacagaggtgactctatcctatgtctttccttcctttcacccagcctggaacctggtgagcaaggaatgcatggcactaggggctcagtgacctgggttcaaatcctaccctggcacccatagggtctgataagatgcggtggaaggcaattcttcctctgaacttcaatttcggactctgcaaaaaaggacacaaataccatataaagcccaaagcacagggctgggcagagtatatgctcacagacaaaagccactcctccagtttctccttgacaagacgatctgaggccaaggttggccaagggctcacatcacacctctcccacttcagctatgagacctctgggaaatctttgcacttcacagtgagtgaaatgattcctcatctgtaaaatggtatcacacttctaactagctcgtagctctccataaaataggcctaaccacaggtatgttttgagacttaagtgagatcacatgtacaaaagccctgtcacacgcctggcatggggtgaatgctataaacactgggcatccactagctctggaaatgatctgcctctctgagatgctgttttctcatctaaaagggagagcataacaacagcgcctaccgctctagaattcaagtattcagcaagtttatctatatgaagcattccaaacagtgtgtggcccacagaatgcactcagttactgtcagccatcaatttcatgattactgttttcactgccactgttagccccatcaggcaaaccctctaaaagctggcaggagaggaccagaggaacaaacccctagtggagaaagattctacagagtcgccgctgcctcacagactgtgggacctttctctccaggaaccacgagccacggaagccagtcagcttggaagtcactgctgcggactaggggcaaccatctgccccctctgaccacatcaccagcccaggtctgctgggtcaatcagggactgcagccagtcctctgggaactccagacccagagcaaaggctacagggcaagccaaggtcatgatctggcctagggagcagggacactggccacagacctctggggctggctgctcccagcaccagcccacagaccacaataagacaccagatccatgggggatctgactgtcccaagcccttcagagcagccttcctccctgggccaggctgggccaggggcacccccactccaagtccccttggcctatgcaaagaggaacagctgggaaaacagctcccggcctcactgcaaggccaactgttactgccttggtggggagtgtaaacatgatgtgtgaccgagctggtaactgggagacacaaacagcttcgtggccagcgacagaggagcatgtagtggtctgcgttggttcctggacccttcacatccactgccaaccaagttcagcccacgagtgaactcctgctgcttctctgggaaggtaggagtggatgaagttgaaaagcagcccattggaggctctagttactccagcccaggcgtcttgctgagccccaagaggtctccaaatgagaggaagaggtcctcacaatcccaagatcaagatgcccccagagagcttccctggggggaagaggtgttcccccaaacactccttcctcccaagttttaacaagcgggtgcaggggcacggctcctcaaatccaagcccaatccctcttcctcttcagaatgttaaggctcagacaacttcagtgacttctaacacagctttcctccctcccctatggaaggaaagaactgttactgcctggtaaataatctgagagggtaatggaatccagagcagcacctccatggtccaaagcaccccagtaaccatgacgttccctccagagtcgttaagaagttcaataaaggctgagatcagtgtaaacccccaacgccacacacgtcaaatacaggaaacagaaacccctcctcaccaatcggcatcacagtcctcccaaaatacgcccctaaaacccactagggcctgtcccgccccgtcccagtcccttaaagatcacaaacatcacagtcctctgatttgggttcccctacgttctaagcagggctcccccaacgccgtggtgatataacccagccacagttggggaagcatcctccccagaagcccccacccctgtaaatacagcacagcaacggcttccacagcgccaaaaaggtacagccctctacacttgatgcggcgcgccccctcgatagcttagcccgcgcacgccaggctcgatctgcccgccgcgcccgaaaggtccagcccccggcccgcgcacgctgcggcctgcgctccccgtcccgcaaacttgcagcgctccccccaccgcctcagtggtatggcccgccgccaccgccccggccccccgaggctggtcccaccgcccccgctcggccacccccactcagctcctgaaggaggggctcgagggccgcggtccccccgccgggcacgggtggtacagcccatcgcggcaccgcggggggcccggacgcgaccatcgtggggggggcgttcggggacacgcgctggcgcactcacctgtcaccggcagccgcccagcctctccggcggggctctacccccgcccatcgccacgctgcgctggttccctttccttgtgtttcccggcagcggcaacggcgccggcagcggcagcggcggcggcgacgcctcctccgaggcaggcccaacggctagcacggcgcggccccccccgccccctccccccagcccccgcttaccgccccctcccaccctctggacggaaataccgccctctcgcgccacaaacaggaagtgacgtacaaagagccagagacgaactctgagagagcgagagcgcaagagcagggcagagaaggaggcgggctcacagcagggcgcctgcgcacattagacaactttgggcctgtgtgggttagagatgggcctcgctaggccgtggggcggaaaggcgagatggggctacgcaggcgcactaggactccgacgtctgctttccctagggcctagccgtagtgattatttcccggcagcccctagtccgtatttacatacgctttgatcttgttttactcagttctgggttctgacgctcttaaaggaccccggagcgggagttagttaggaggggtttccttttcagtgtgctcgtcatggttgagctcaggctctgaagccacacaaccccagacttgaatttcctcctttctggtgactgtgggcagaaggcttgaccgttttctgtgcctcagtatccacatctgctaaatggaaacaatcatcgctgtgtcgctggcttttgaaccattttaatgtaaacaaaacggtttttaccaattagttcattactgcaagatattaatgccacctgctctcatcgtacatattccagtgaatctgggatataacattttataatgcaacttgggcccataaaggccttaaaatcaccctgcggccgggcgcggtggctcactcctgtaatcctagcacttggggaggccaaggcagacggatcatgaggtcaggagttcgagacagcctggccaacatagtgaaaccccgtctctactcaaaatacaaaaaaaaaaaaaaaagccgggcatgtcggtgtgtgcctgtaatcccaactacttgggaggcttgaggcaggagaatcgcgtgaacccgggaggcagaggtttcagtgagccgagatcatgccattgcactccggcccgggcgacagtgcaagtctccgtctcaaaaaaaaaaaaaaaaaagaaaagaaagaaaaaagaaaaaaaatgaccctgcaagaaaagagctttgcacagatcctaatccgtatattagctagtatactggacagctgtgagacatctggctcccagcccctcctctctcataggggattgtgctgcctcctgaatttgggttccagtatgccatataacttggcaattgtatgcattggtaagtgagaaaaatgcctgactgagagttgaatcctgggtccacctcagtctgtgagagtgtttcaggcaaatcctgctgagggttcggctttcgttttctgagacgtaaacctaatgctggaactagccctttcttatttggtttctagcttggaacttgctgcttggtattcctaattcccggtcttccccatcagtcggtgttaataactctgaccaatgcctcccccttcacagccctaaccattttcatctattactgtctggtgacaggtctgtttcccccactgcacaggaaacacagtaaaggaagagaccaagactgtctcagagatcagtgtgtatccaacattgcccagagtgggctcttgcagaatgtttgtttcaagcattagcccttctgccctaatctagactcaaggttactgtgaccaaccctcttcactcctgtccacactgaacagctcacaggccattcccctacgtctaagtctcccctgggccaacttgaatcctagcccctcctagggcacttaattatgacacactgagatctcactgaaaccacccatgtgcttgtgtataaactccttgcagcactggtagtcaagggcagtggctttctctttttttttttttttttttttgagactcactgcatcgccaggctggagtgcagtggcgagatcttggctcactgcaacctctgccctctgcctcccaggttcaagcgattctcctgcctcggcctcctgagtagctgggattacaggcacgcgccaacacgcccagctaatttttttgtatttttagtagagagggggtttcaccatgttggccaggatagtctccatctcttgacctcgtgatccacctgccttggcctcccaaagtgccgggataacaggtgtgagccactgcacccggctctttctggttttggttttttattgtttttttgagacagggtttcaccccctccgtcaccgaggttgaaatgcagtggcacaatctcagttcactgcaaccgacacctcccatgctcaagcgatcctcccacttcggcctcccaagtactgggaccacagatgtgcgccactatgcccagctaatttttttgtatttttggtagagacggagtttcgccatgttgcccagactggtctcagactcctgagctgaggcgatccacccaccttagcctcccaaagaactgggattagagatgtgagccaccgcacttggcctaatattctttttttttttttttttttttgacacagtctcactctgtctcccaggctggagtgcagtggtgccatccgccatctcggctcactgaaacctccgcctcctaggttcaagtgattctcctgcctcagcctcctgagtagagggattacaggcgtgcaccaccacacctggctaatttttgtatttttatttatttatttatttttgagtctgagttttgttcttgttgcccaggctggagtacaatagcacgatctcggctcaccacaacctccgcctcctgggttcaagcgattctcctgcctcagcctcccaagtagctggtattacaggcatgcaccaccacgcctggctaattttgtatttttagtagagatggtgtttctccatgttggtcaggctggtctcgaactcctgacctcaggtgatctgcccaccttggcctctcaaagtgctgggattacagacatgagccaccacgcccagcccttaatatactatttatttcaattccgcaaccctgctgaactgattttctggttgtgccttgtagtttgtaaaacattagtctaggaggtaaacaacactttttagcattgatgatgagtaggcccaggttctaatcgtatcttttctgtgtccttgtcaaagtcacttcacttctctgagcttgcctttctttattctattaagacagtaataatataatttatttagcaattgttacaggccaagttctgtgtaaacacactcccactgatgctatcctgttgctatctacacagtaaccctggaggttaaatgtaacagcacattaagggccttgcttgagttcccaggacaagttaaggacaaagacagtatttgaacccagacagtttgataccagagcctgtgctcttaactcaactcatgctagaaaatggaaaagtattggccctacttttgtgccctatgttacttctgcaaatggcttagttatctttggggggcctcaaaggccatcctgggcaacatagcgagactctttctctattttcagcatcaagggtgaaacttgagggccactttgaatcttgtggcagggcaacacagcgagaccctttccatttcagcatcaagggtgatcgatcgaggcgactgggcatggtggctcacacctgtaatcccagcactttgggaggcagaggcaggtggatcacctgaggtcaggagttcgagaacagcctggccaacatggtgagaccccatttctactaaaaatacaaaaatttagccgggcgtggtggcaggcgcctataatcccagccacttgggagactgaggcaggagaattccttgaacccgggaggtggaggttgcagtgagcggaggtggcaccattgcactccagccttgtcaacaagagcaaaactctatctcaaaaaaaaaaaaaaaagaaagaaaaaaagtgtgaaccagaagaaaattccctacaacctcaccccattttcttccatcttaatctagtctataaactctctccccataactataagtatggactgcacatgcactttgctgggtagagggggccggtaacttattgaaagctgttcaaaggtctcttgattcagaaaaaagaaaacgatgagggatcttgccccaagggttggagaggacatctcctcaaagcccccttctgtgcccagggagtagaaatcaggcccaggagtccattccaaggcttctcacagaggagtctccttatcgatggcaactggacaagctgtggggactagtcacaaaataatttttttttttgagatggagtctctctcagtcaccaggctggagtgcagtggtgcgatctcggctcactgcaacctccacctcctgggttcaagtgattcttctgcctcagcctcccgagtagctgggattactggcacccacaaccatgcccggctgatttttgtatttttagtagagacaaggtttcaccatgttagccaggatggtctcaatctcctgacctcgtgatccgcccacctcagcctcccaaagtgctgggattataggcgtgagccaccgtacccggccccatttttattttttatttaaaatattaggctggacacagtgtctcacacctgtaatcccagcactttgggaggccgaggcaggaggatcacttgaggccaggagttagagaccagcctggccaacatggcgaaaccccgtctctactaaaaatacaaaaattagcccgggaggtggcaggcacctgtaatcccagctactgggaggcggaggcatgagaatcacttgaacccaggaggcagaggttgcagtgagccgagactgtgccactgcactccagcctgggtgacagagcgagactctagctcaaaaaataaataaataaataaataaataaataaataaaatatttaaaagagtttcccacattataaagaaatgccaaaatcatgtatttgattcccgagccagaatctacaaagcccactccccactgcctcccccagatactaccgtgttgggaagatcctttcagagtaatgttattaatatatttggcagaagtacatataagcatcagggattccgcaaatgttggttccaatttccttttttaaaatttgtttctttttcaaaaattgtaatggaagacacagtgcacattcaattttctaatatatcggagattctcgaaacgtttaagtccaggtgcagcatctcaagcctgtaatcccagcactttgggaggccaagacaaggagatcactcaaacttaaaacttcaagaccagcctggataacatgacaaaaccccttctctaccaaaaaatacaaaaaaaaaaaaaaaattagtcgggtgcagtcgcacacacccatggtcccaactactcaaacaaaacaacaaatatttaagtggtcatgctaggctagtatactttgtgtagaccttgggatgaagctttctctgctcttttttctttctttcttttctttttcttttactttttttttttttttttttgagatggagtctcactcccgtcgcgcaggctggactgcggtggtgcgatctcagctcactgcaacctccacctccagggttcaagtgattctccttcctcagcctcccaagtggctgggattgcaggcgcccaccaccaccccaagctaatttttgtatttttagtagaggtggggttttgccatgttgtccaggctggttttgaactcctggtctcaggtgatccacccgcttcggcctcccaaagtactaggattacagacatgagccaccaagcccagcctcttttttatttattattttactactattttgagacagagtctcactctgtcttccaggctggaatgcagtggtgtgaacacactcactgcagccttgacctcctgggctcaagcaatcctcccacctcagactccagagtagttgggaccacaagcgcacaccactacgcccagctaatttttttttttttttttttgagatggagtttcgcttttgttgcccaggctggagtgcaatggtgtgatctcggctcactgcatcctccacctccaccacctgagttcaagcgattctcttgcctcagcctcccgagtagctgggattacaggcatgtgccaccatgcccggctaattttgtatttttagtggagatggggtttctccatgttggtcaggctggtcttgaactcctgaactcaggtgatccacccgcctcggcttcccaaagtcctgggattacaggcgtgggccactgcacccggcctgcccagctaatttttaaattttttagagatggggggggtctcaccatgttgcccaggctggtcttgaactcctggcctcaagcagtcctcctgcctcagcctcccaaagtgctggaattacaggcatgagccaccacacccagacttttctcctctcaataagatcaaacacctttatcaatctgcttccaacacatagatggcttccaatcccatgtggaatataaaccaaaggcctcaccgtggccttcatggctgtatatgatctgtccctgcctgtttctctaacttcatcacaaactactcttgtccctggcccatgttccagacacacatacctcctctctgcccctacaaaaagacaagcatttgggaacttgctgtctcctctggctggactcttcatgtccttgatcctgatcttggcatgactggctccttctttcttttctttcacaactctgttcaaatctcacctccgggtgcagtggctcatgcccataatcccagcactttgggaggccgaggcagctgggtcacctgaggtcaggagttccagaccagcccggccaacatggtgaaatcctgtctctacaaaaaaaaatacaaaaattagctaggcataatggtggctgcctgtaatcccagctacttgggaggctgaagtgggagaatcgcttcaacccgggaggcagaggttgcactgagctgaaatggtgccactgcattccagcctgggcaacagagcaagactccgtctcaaaaaagaaagaaacaaacaaaaaacccaaatctcacctccttgtgcactccgagtctaaaagggccatgctgtcactatgtttgtaagcatatttgaatcctctacctaggacttaacactaaaatatttttgttgtttattttgtgtcctcccccaagccagaatatacatttgctcatgaggacaaggactactgggtaccgctgtattcccagcccatggaagaatgcctgtgaaagagttcaggacacaccaccccaatatatgcccatttgatatgctgattacttcaaacagagggaactcaggggaacagtaagtgcagggactttctctgaccttcccttacctgtctgcacacggatcctccaaaaggaactccattgtcatgaatcccctccccaggaatcttctcaatcagagaagatgagctcagatcacaggagaggagaccggaggttgacgtgatgcccagactgtcacctattcttccgggaaaacttttcttaactaatagacaatctgcataacaacttttattcaccatacacctcctccctgcaccctcccataacttatgtcaccaccacctcccaaaagccccaagcccctcttcttttctgcaggtcaggatgctatatgataagcttcaatcctctgacacttctttaaatctcatattttgtgggactctcacgtctaagtatgtaattttttttttttttctcgagatggagtctcactctgttgcccaggctggagtgcagtggtgcgatctcggctcactgcaacctctgcctcccaggttcaagcaattctcctgcctcagccttccaagtagctgggattacaggtgcccaccatgccaccacgcctggccaatttttatatttttagtagagatggggtttcactattttgcccaggctagtctcaaactcctgacctcaagtgatccgcccgcctcagcctcccaaagtgctgggattacaggcatgagccaccgtgcccagcaattttttgctactttttgtttgtttttgttttgtttctgagacagagtcttgctctgttgcccaggctggagtgcaatgatgcgatcttggctcactgcaacctccgcttcccgggttcaagcgattctcctgcctcagcctcctgagtagctgggattacaggcaagtgccaccacaccaggctaatttttctatttttagtagagacggggtttcaccatgttgatgaggctggtctcaagctcctgacctcatgatctgcctgcctcggcctcccaaagtgctgggattacaggtgtgagtcaccatgctcggccttttgctactgttaatctgccttatattggtttaatgtgtaagccagccaaagaacttagaagcatagcaggaggggccgggcgcagcggctcatgcctataatcctagcattttgggaggccaaggcgggcagatcacgaggtcaggagttagtagaccagcctgattaacatggtaaaaccccgtctctattaaaaatacaaaaattagcaaagcatggtggcacatgcctgtaattccagctacttaagaggctgaggcaggagaatcgcttgaacctgtgaggcggaggttgcagtgtactgagatggcgccactgcactccagcctgggcgacagagcaataatccgtctccaaaaaaaacgggtagcgggaagccatttttcactcccttcgagtttctggtgcccaacgtggggcatctttcactttttactctaggactgcttcagcagcaggctcctgacatgcctgaccaaacactggccacagataagatttcctaccacattagccccccagatctctgcctgtagagtccagcggaagcaagataggtaagggtctctttgtctttttcccttttctaagtttggattagcaggagaaaatgtgtgcgaactagttcttgtataataactctggtttttttgtttggttatttttttttttggtggtgaggggaggtattattgttttctgattcctcccctcccagagatggtcattattttcccatgtctgtgtcttttgtgttgtgtcatacagaagagaatcatagggcaagaacacaggcctcaaagactggtgagttcacagttctctgcaaaccaatgtctgttcagactaattttgctgtgggtccccaagacaaaaaccagatgaggtgctccttgggtcttgttttatgtcctcagagcttggcttttccatcagtgagaacactctggcctctgccagctgagggtgcaagtgtcagcctgtgtcagccagccagtcaaataggctggaagcccacgatgcagtgacaagcggcattctctttgtccactcgtgccagctctcaggagagtttggtcccaataactgtcccagtccgtagggctttgttgtctcaaccttcaattggacaatgctaggaaagtccaatcccagtagtgcttgcccggtgtcacagattagcgggtcagtgagtgtcatgagacaccatttacacaaacactatccttaatgcctgtggcaacaaaggtctttgctttctttttttcttttttgagacggagtctcgccctgtcgcccaggctggagtgcagtggcttaatctcgcctcactgcaacctccgcctcctgggttcaaatgattctcctgcctcagcctcccaagtagctgggattacaggtgcctgctaccacgcccagctaatttttgtatttttagtagagacagggttttaccatgttggccaggctggtcttgaactcctcacctcgtgatccgcctgcctcagcctcccaaagtgctgggatgacaggcgtgagccaccgtgcccggcctaaacagctgtcttattggtacctatggaaagatcaagaagaaaagaggacagaaagggatataacagctagtcttagagactcctctaacaagattaaaaagcagaaatcagattactttttttgtttgtttgagactgagtctcactctgtcgcccaggctggagtgcaataacgtggtctcagctcactgcaacctccacctcccaggttcaagcgattctccctgcctcagcctcctgagtagctgacattacaggcgcccaccaccatacccggataatttttgtatttttagtagagatgaggtttcaccatgttggtcaggctggtctcaaactcctgacctcaggtgatccgcccgcctcagcctcccaaagtgctgggattacatgcatgagccaccgtgcctggcctagattatttatttacgtatttatttattgagacagggtctcgctctgtcacccaggctggagcgcagcgtcgcaatcaccactcactgcagcctctgcctcctggactcaagtgatcctcccacctcaacctcccgagtaggtgggactacaggcatgtgccaccactcctggctaatatttttagttttgtagagacagggtcttgccatgttgcccaggctgctcttaaactcctggtctcaagtgatcctcctgccctggcctcccaaagtgctgggattacaggcatgaaccaacatgcctggcccactcatgtaaattaaatacagtcacgtgtcacttaatgatgagaatatgttctgagaaattccttcattaggcaattttgtcattgtgtgaacatcagaaagtgtatttacgcaaagctagatcatatagcctactatatacctaggctataagttatagtctattgctataaacttgtactgcatgttattgtactgaatactgaaggcaattgtaacacaatgctgtttgtttgtttgtttttatttttttgagaccaagttttgctctgtcgcccaggctggagtgagtggcaccatcttggctcactgcgacctctgcctcctggattcaagcaattatcctgcctcagcatcccgagtagctgggattacaggtgcacaccaccatgcctggctaattttttgtatttttagtagagatggggtttcgccacattgaccaggctggtctcgaactcctgacctcaagcaatctgcctgcctcggcctcccaaaatgctaggatcacaggcatgagccattgtgcctggccaagtgttcgtatatctaaacatagaaaaggtacaataaaagataaaagtgggccaggcgcagtggctcacacctgtaatcccagcacttcgggaggctgagacaggtgaatcacctgaggtcaggagttcaagaccagcctggccaacatggtgaaaccccatctctactaaaaatacaaaaattagctgggcgtggtggcgggcatctgtaatcccagctacttgggaggctaaggcaagagaattgcttgaacccaggaggcagaggttgcagtgagctgagatcgcaccattgtactccagcctgggcaacagagcaagaccctgtctcaaaaaaaaaaagataaaagtggtgcacttgtagagggcatctccattataaccttatgagaccaccattatctatgtggtgcattgctcattaaacatcattatgcaggagatgactgtatgcctaaaactgctagaaatataggaagtaatccaaatgcttttcaagttcacatgacttgggtacatctttggtaaataaaactagtttaatattgttggtttaatgaaaatcagctctgtcttctgacttacaaaaaaaattaaaacaaaaacaaaacccaaaaaccttatacatggatttcacttatggtccttgcttagatgatggctgcctgacatgcatttgatgtaaaaatggtgaatagtggggacaggcacagtggctcatgcctgtaatcccagcactttgggaggccaaggtgggcagattagttgaagtcaggagtacaggaccagcctggccaacatagtgaaacccagtctctactaaaaatacaaaaaagttagccgggcgtggtggctcacgcctgtaatcccaacaccttgggaggccgaggtgagtggatcacaaggtcaggagttcaagatcagcctggccaagatggtgaaaacctgtctttactaaaaatacaaaaattagctgggcatggtggcgggcatctgtaatcccagctactctggaggctgaggcagagaattgcttgaacccaggaagcggaggttgtagtgaggcgagattgcaccactgcactccagcctgggcaacagagcgagactccgtctcggaaaaaaaaaaaaaaaaaaaaaaattagctgggcgtggtggcgggcacctgtactcccagctactcagaaggctgaggcaggagaatcgcttgaacctgagaggcggaggttgcagtgagctgagatcgtgccactgcattccaggccgagcgacagaggtgactccgtctcaaaaaaaaaaaaaaaatagccgggtttggtggtgcacacctgtaatcccagctactcgggaggctgaggcaggagaaagaatggcttgaacccagaggcagaggctgcagtgagccgagatagagtcactacactccagcttgggtgacagagtgacactctgtctcaaaaaaaaaaaaaagaatggtgactagggaaatgacttgggagagctgactttgtctaatgtctcatgaaacttccatgactaatctaagcataattgttaagaacatgtgaaataaataaatgtaagtaggatcaaagttgataaatgaacttttcaacaacaatcgtgctttatgctttaacccaggaggcggaggttgcagtgagctgagatcatgccattgctctccagcctgggctataagagtgaaacattgtctcaaaaaaaaaaaaaaaaaagaaaaaataattgtggtttataaatagctctttaaaacggtttcccaacctcactgataacaacacccttggatggcagatattaattaaatatccaggtcatttccaaataaaacaaaatactaaagcattcattgctgaacacagacacaagtttatttacctttggcttcttaaaatttatagaaagaaataatatatttgggtccataggtaaacatgtcctgtttcatactgaaaaactattctgcgagaaaacacgtttctagaaattatgtgtcttcacaaaatgttagctcatgacagttcaaaatcgcttacttcctaggtttcgctgtagagttgctaagacttaaaattctcatatataattatataactactataagtgactctgtatgcaaagtgtacaaggaaagtaagatgttagtgaggtatgaagatgtgggggggttttgttgaggaaaaataacttagtctagtttataagttgttgcagaataaaggaaggaagaaaagatacaggtaaaactgaatgcatataaaagttggaaagagagaatcttttgtggtcaaactgaccaaaattgagtgaatttattatgtcttaaaaatgagagtgaatttattatgtcttaaaaatgagccctaatatcaagggtacattgatgcaaaactagaatttggcattatcttttaaaatgcaagattttcttgtagtattgataaaaaagagtgaaagattttctttttcaccttttaagtaatctgccttaaaaaattatgtcttatcaaaataattttctctttcatgttatcttttatcaggccttcaattactttccaagaaaataaaatcctattaagagagctaatatatatatttttacaactatataactttatttgccttcaaagccttttaataattaccctggtgattatgaaatgaatattaataaatattaaatgctcattaaatacttaaatcataaaatattaaatgattataaaatgaacagttgattaaataggatcccagatcactatataattcaataatcactctggtaaccagactaattattagtgacctaaattaatagttacctgagatcctattaatcaaatttttccttttttcttttcttaatttcaaaaaatatggaaggcctcatgaatttgtgagttatccttgcacaggggccatgctaatcttctctgcatcattccaactttagtatatgtgctgccaaagcaagcactcatcaagtgttttaaatctttttttacatttttgacaaacttcctaaaatcaaattctaaattcagtcttttgaccttgaattaactttggaatttgccagttgagcccctgggaaagctcaaaagatgtgtttctcacctcgaaaaagagagacattagccaggcacggtggctcacgtctgtaatcccagtactttgggaggccgaggcaggtggatcacctgaagtcaggagtttaagaccagcctggccgacatggcgaaaccctgtctctactaaaaatacaaaaaaaattagtcaggcgtggtgacgggcacctataatcccagctactcgggaggctgaggcaggagaatcgcttgaacccagggggcggaggttgcagagagccgagatcgcaccattgcactccagcctgggtaacagagcgaaactccatctgaaaaaagagagatattagactaattaggcttatttgaaatgttaaattaaatgggaaacattgtcaaataataaatgatgctaaacgtttatatttatgaacccagggtaggaggtgatgagggtgataaaaaacatttttttaaataagttatatggccgggtgcaatggctcgtgcttgtaatcccagcactttgggaggccagggcaggtggatcacgaggtcaggagttcaagaccagcctagccaacacaatgaaaccccgtctctactaaaaatacaaaaattagctgggtgtggtggcaggcacctgtaatcccagctacttgggagggtgaggcaggagaattgcttgaacccaggaggcggaggttgcagtgagccaagatcgcaccactgcattccagcctgggcgacacagctagacaccatctcaaaaaaaaaaaagttatatttctggatatgttactgatatgaatgttctaaaaattatgagattcctagaaatctaatgttataagtcataattttgttactatgttaacatgatatatgccacagaaataaccaggtttccttgtcaattgctggttataatgaactctcatcagattttttaaccatggccattctgtcttgctcatcaatagtgttttggttcttctctaaaagcatttgcaatcagctattgccccaaattgcttcttcaagattcatggaaatgactctgacaagtagtctggaatagaaggtcctaataaacttatgattataacattggactgggtaagaatttccaaaactctagtggaaaaactggactcagaaaactgctgactcgactaggtgtggtggctcatgcctgtaatactagcactttgagaggcccaggcaggcggttcatttaaggccagaagctcgagaccagcctggccaacatagagaatcccgatctctactaaaaatacaaacaaaacaaaaaaattagttgagtgtggtggtgcacacctgtaatcccagctactccagaggctgaggcacgagaatcgcttgagcccgggaggtggaggttacactgaaccgaggcactccagcctgggtaacagagcgagactctgtctcagaaaataaaaagaaaaagaaaccctgctaacaacatcaggaagaataagaattacatgggactgagctgacagattataatttttttttaatacctacagtattatagtgccataggcatagtttgatggcaagtccctggcttcataaccttgagaggcttttatttatttatttatttatttatttatttatttatttattcttgagacagagtctcgctctgtcgcccaggctggagtgcagtggcatgatcttggctcactgcaacctccgcctcccaggttcaagagattcttcctgcctcagcctcccgagtagctgggattacaggaacccaccaccatgcccagctaatttttgtatttttggtagagacgaggtttcgccatgttggtcaggctggtctcaaactcctgacctcgtgatccacctgcctcagcctcccaaagtgctgggattgcaggtgcgagccaccgcgcctggcctgagaagctttgcctggccaacatagagaaacccatctctactgaaaatacaaaaatttgctgggcatggtggcccacgcctgcagtcccagctacttgggaggctgaggcaggagaatcactccaacctgggaggtggaggttgcagtgagccaagatcactccactgcactccagcctgggtgacagagcaagactctgtctaggaaaaaaatcttaaaaaaaaaggtccaatctgggccaggcacagtggctcatgcctgtaatccgagcactttggaaggccgaggcaggtggatcacttgaggtcaggagttggaaaacagcctggtcaacatggagaaaccccatctctactaaaaatacaaaacattagccgggcatggtggtgggcacctgtaatcccagctactcaggaggctaaggcaggagaatcgcttgaacccgggaggcagaggttgcagtgagccaagaacgtgccactgcactccagcctaggcgacagaacaagactccatctccaaaaagcaaaaaaaagaatctttacaatcaatcattattcttactgctcttacataaataatcaggccaagtttaataagagaccaaccttattttgcaacaaattgatatttttttccttgaaacagggtcttgctctattacccaggctggagtacagtggtaggatcacggctcactgcagcctccaccccccaggctcagatgatccttctgaggtcagcctcctgagtagttgggactacaggcatgcacgaacatgtctaatttttttgtatttcgtgtgccaccacgtctgatttttttgtattttttatagagatggggttttgccatgttgcccaggctggtctcctagactaaagcaatctgcttctgcctcgactcccaaagtgctgggattacaggcatgagccaccactcctggcaacaaattgatctcattgtgattgtgtctggcagaaatgggggtgactgtacaaagaaaaatcatgtttcagaagaaaactatagtgtatccattattagattctagttcattgttgtggagggtttgttatttacctggaaacttgagtggatcctgaattcttccagtttcctcaaatgtctggctatgactctccaaactaacatttccagtctttctcccttctgacttggagttactgaaagtaagacttcctttcctgaagccctgcaagctaaaactagaagacttgatagagacttcagataaatcaccacaaacacttaggtatacaccaccttcatgcctaccaatatacaaactaatcagaaagttcactgggatcacacctataatcccagcattttggaaggccggggtgggaagaccacctgaggtcaggagttcaaggccagcctgggcaacgtggtgaaaccccatacaaaaattagccgggcggggtggcgggtgcctgtaatcccagctacttgggagtctgaggcaggagaatcgcttgaacctgggaggcggaggctgcagtgagccaagattgtgccattgcactccagcctgggcaacaagaacaaaactccatctaaaaaaaaaaaacaggccaggcgcagtagctcacacctgtaatcccagcactttgggaggccgaggtggggggatcacgaggtcagaagatcgagaccatcctggctaacacggtgaaaccccatctctactaaaaatacaaaaaattagttgggcatggtggtgggcacctgtagtcccagctacttgggaggctgaggcaggagaatggcgtgaacccaggaggcggagcttgcagtgagcggagatcataccactgactccagcctgggcaacagagcgagactctcaaaaaaaaaaaggccggcacagtggctcatgcctgtaatcccagcactttgggaggccgaggcaggtggatcacaaggtcatcgagaccatcctggctaacacggtaaaaccccgtctctactaaaaatacaaaaaattagccgggcgtggtggcatgcgcctgtagtcccagctactcaggaggctgaggcaggagaatcgcttgaacctggcagacagaggttgcaatgagccgagatcgcatcactgcacttcagcctgggcgacagaacgagactttgtctgaaaaaaaaaaaaaaaaaaaaaaaaaaagttcactggaacccctaatgcaaattgcaaccaggaaaatctgtgtcaaattatcactgcctgcccctactccaactgaaaatgctttgatccagcatctagaaatcatgtcaattggctgccctccaggctcagaaactagtttacagattgctgcaaacattaaccttattcttttgtttcctcttattaaatacctgtttgcttgtgccatacagaggcctgactgtgatggcagcccacctgccacaccacctcctggaatgagacagaactgattaattggactgacctagtcccaggtctcatactattcaaacactaatctgatttttctgtcatccaccaccaaatcaacttttagcatgtggaacttctagagaagtttcagataggagaaatgaagaagttcgagaaatgccatcccaaaatacatccctttgatagactgattacttcaaatggagggaacctggggaacagcaagggcagggaggactttctttgaccttcccttatctacctaaacacggatcctccaaaaggaacttcagtgtcacgaatcccctccccaggaatcttctcaatcaggaaagatgagctcagatcacaggagatgagactggaggttggcaccacgcccagatctattcttctgggacaacttttcttaactaagagacttataatctgcataacaagacaacttttattcaccatacacttcctccctgcaccctcccataatttaggtcaccaccacctcctagaagccgcaagcccctcttttttctgtagctcaggatgctatataagcttcaatcatctggcccttctttgaatctcatatattgtggggctcctgtgcatacttacttaattaaaatgagtttttttctactgttaatctgccttatgtcaatttaatatgtagcccagtcaaagaacctagaagggtacagggaagccattttttgctcccctacaccaggcacatagttgggacttggggatcaaaaaatatttgtttaccaaatgcagttttgattaggaaggttaaagctctgtactaggctgatttttattccaggtctgaacttgtctgtttaccgagttggccaggcacggtggctcatgcctgtcatcccagcactttggaaagctgaggtgggcggatcacttgaggccaggagtttgagaccagcctgctactaaaaatacaaaaaattaggccaggcgcggtggctcatgcctgtaatcccagcactttgggaggcaaaggagagcggatcacctgagatcaggagttcgacaccagcctggccaacatagcgaaatcccatttctaccaaaaatacaaaaattagccaggcgttgtggtgggcacctgtaatcccagctaatcaggaggctgagggaggagaatcgcttgaacctgggaggcagaggtttcagtgagctaagatcgtgccactgtactccagcctgggcgacacagtcagactctgtctcaaaaaaaaaaaaaaggtagatttgaaatagaaaaatccttacaacacagcctcccacattactaagaaaaactgaaataatataaacaccacctgatctttttcaagaagagaaaaatttcacagctgcccagtggatttataaactctattcacttgccacaagatggcgccacatgagctggtcatccctgcagaaacccagctatgtcttgcaggcatcaagtcttcctagagcaatttgcgggaccattatatttgaacattcactgtctaaaaggaagctcttacacgacacctaaatgcaacatgttaagtcaccagggtgtctcggaaaagataaataaataaatgtaacatgtgatcctgaattggattccaagccaggagaaaaaacagcaataaggaacgttattgggacaattgatgaaattggaacatgaattttgcattagataaaagtatcatgtccatgttaaatttcttgttttgatagttgtactgtgcttatgaaagagaatgttcggccagacatggtgacccacgcctggaatcccagcactttgggaggctgaggcaggtggatcacctgaggtcaggagttcaaagaccagccagcccaccatggtgaaaccccatctctactaaagaatacaaaaattagccggacgtggtggtgggcgcctgtaatcccagctactggggaagctgaggcaggagaatcgcttgaacccagatgaaggaggttgcagtgagccaagatcgcaccattgcactccagcctggacgacaagagcaaaactctgtctcaaaaaaaaaaaaaaaaaaaaaaaggaaagagaatgttcttgatcttaggaactacacacaagtgtcctgaggtaaagaaagacacatgatgttctccaacctaattctcaaatggctcataacacaatagatatagatgatgcatgtatccttatggaggggagaagagggaacagtaagacaaatggaacaaattgtaaacaattggcaaatctgggtaaagagtatacagaaatcctttgtactcttgttactttttttttttttctgagaccaagtctcactctgctgcccaggctggagcgcagtggcgagatctcggcttactgcaacctccgcctcccgggttcaggcgattctcctgcctcagcctcctgagtagctgggactacaggcacccaccatcacgcccagctgatttttgtatttttaatagagacgggatttcaccatgttggtcaggctggtcttgaactcctgacctcaggtgatctgccagcctcagcctcccaaagtgctgggattacaggtgtgagccactgcatcaggcttcttgttacttttctaaaagtttacaattatactaaaataaagcattaccaaaaaagttattttatagcctgtaagaatgtcattaaaatttttttttttttttttgagacagagtcttgctgttgcccaggctggagtgcagtggtgcgatctcggctcactgcaggctccgccccccggggttcacgccattctcctgcctcagcctcctgagtagctgggactacaggcgcccgccacctagcccggctaattttttgtatttttagtagagacggggtttcaccatgttagccaggatggtcttgatctcctgacctcgtgatccgcccgcctgggcctcccaaagtgttgggattacaggcgtgagccaccgcgcccggcccttttttttttttttttttttttttttgagacgaagtcctgctctgtcacaggctacagcgcagtggtgcaatcctggctcactgcaacctctgcctccccggttcaagtgattcttgtgcctcagcctcctgagtagctgggattacaggcgcatgccaccatgcccagctaacttttgtatttaagtagactctgtgtttcaccatgttggccagactggtctcgaactcttgttttgaagtgatccacccacctctgcctcccaaagtgctgggattacaggcatgagccaccatacccgagcaggtgtgtttgtttgttgtttggagacagggtctcgttctgtcacccagactggaatgcagtggcatgagctcggctcactgcaacctctgcctcctgggctcaagggatcctcttgccttagcctccctagtagccgccatacctggctaatttttgtattttttgtagagacagggttttgccttgttgcccaggctggtattgaactcctgagctcaagcaatccacctgcctctgtctcccacagtactgggattacaggaaatttcagagataaaattaggtatcaacactgtatgccaggtactgttttaagcctttcacactaatcgactcatttaatccccaaaaccattccatgggataggtgctattattactctcatcttggtttttttggttttgtggctttttttttttgagacagtgtcttgctctatcacccaggctggagtgcagtgatgcaattttggctcactgcaactccacctcccgggttcaagcaattctcctgcctcagcctcccaagtagctgggattacagtcacccgccaccacgcccggctaattattactctcatcttagtgaagaggaaactgaagagaggttgagtaacttgtggatcacacagctgtaggatcaagctcttcataataacacacaatcaagaaggtttaaggatggccaggatatgctctactgataattcaggaccaagtactctgtaaaatgtctggagggaggaaaggcaactttatttatttatttatttatttagaaacgaagtctcactctgtcgccaggctggagtgcagtgacacaatctcggctcacagcaacctctgcctcccaggttcaagcaattgtcctgcctcagcctccagagtagctgggattacaggcgcgtgtcaccacacccggctaattttctgtatttttagtagagatggggtttcaccatgttagccaggatggtctcgctctcctgacctggtgatctgcccgcctcagcctcccaaagcgctgggattacaggtgtgagccaccacgcccagccagaaagtcaacttttttttttttttttgagacagagtcttgctctgtcacccaggctgcagtgcagtggcgcaatcttggctcactgcaacctccacctcccaggttcaagcaattctcatgcctcagcctcccaaatagctgggattacaggcgtatgccactacacctgacaaatttttgtgtttttagtaaagacaagttttcgccatgttggccaggctggtctcaaactcctcacctcaagtgatccgcccgcctcagcctcccaaagtgttgggattacaggcgtgagccaccacgcccagaatagaacattttataagaatacacaacaaaagcacagtggctcaagcctgtaatcccagcactttgggaggccaaagcaggcagatcgcttgggcccaagagtttgagactagcctgggcaacatggccagaccctgtctctacaaaaaattaaaaaattagccgggcatgtgcctatagtcccagctacttgggaggttgaagcaagaggattacctgagcccaggaggtcaaggctgcagtaagctgtgatcatgccactgcactccagcctaggcagcacagtgagaccacgtttcaaataaacaaataaataaaagtggatattgaaaatgatcaggtttgtttgaagaaaattctgatttctcctccagtgataatggctagtaggttcagctacataatcagcagccactttatttctctctctcttttttttttttttttgagacacagtctcactctgtcacccaggctggtgtacagtggctcggtctcagctcactacaacctccaactcccaggttcaagcgattctcctgcttcagcctgagtagctgggattacaggcatgcgccaccactcctggctaatttttgtatttttagtagggacggggtttctccatgttggtcaggctggtttcgaacttctgacctcaggtgatctgccggcctcagcctcccaaagtgctgggattacaggcgggagccaccgtgcctcgcctatttctctcttttattttggttaaaccttgcataattcaggactgatttttgcatcatttgagtgtcaaattgaggcaggggctcagagcacttaaacctaaattcatcataggaaagttgtcccttgaagttgcctttcctccccacgaacattttacagagtacttgctcctgggtggcagagcgaccttatctcaaaaaaaaaaaaaagaatatgcaacaaaatatgcagttactttaaaaggagctttttccaataaggacactaaataaaatatgcttaacatcattagctatcaggaaatgcaaatcaacaccacagtaagatgccatttaacacccactaggacaactataatcaaaaagtcagatactagtaagtgttggtgaggatgtggagaaaatgggaccctcatatactgctggtggaaatgtaagatcatacagctgatggaaaacagtctggcagttcttcagatggttaaaaatagaattatcatatgacccaacaattctactgctagggtatatacccaagagaattgaaaacatatgtctacacagaatacttgtacctgaatattgatagcagcattattcacaatagcccaaaagtataaacaacccaaatgtccatcaactcatagataaacaaatgtaatacatccatacaatggaatattatttagccgataaaggaatgaaactctgatacatgcctggtgacagagtgagactccatctcaaaaaaaaaaaggaatacaggccagccacggtggctcacatgtataatcccagtgctttcagaggctgaggctggaggatcacttgagcacaggagttcaagaccagcctgggctggagtgcagtggcatgatctcaggttcaagcgattctcgtgcctcagcctcccaagtacctgggatcacaggcgtgtgccaccacaccccgctaatttttgtatctttagtagagatggagtttcaccatgttggccagggtagtctcgaactcctgacctgaggtgatccgcccacctccgccttccaaaagtgctgggattaaacatgtgagccaccgcacccagccgaattgttcactttaaatgagtgaattgtctgatacatgaattatatctcagtagagctgtttttctaaaagctctttatgtactaatataaaacaatctccaaggtatattaagtgaaaaaagcaaagtgtaaaactattagatatgtaaccatctgagtaagaaaatataattatgtttgtaaatatacagatatttctgggggaactcataaaactccagtaacactgactgcctctggagaggggaactggatgactgacggatccagagtagaagcagaattgttatttttaaaataagagatgcccaaaaatacataaaaattaacacaatgaataccatgtgcctaccgcccagttttaaaaaccattacaccaggcgcagtggctcacacctataatcccagcactttggaaggccgaggtgagcggattgcttgagtccaggacttcaagaccaacgtgggcaacatagcaagcccccttctctacaaaaaaacctgcaaaaattgggccgggtgcagtggctcacgactgcaatcccagcactttgggaggccgaggcgggcggatcacctgaggttgggagtttgagaccagcctgaccaacacggagaaaccccgtctctactaaaaatacaaaaaaattagccaggcatggtggcgcatgcctgtaatctcagctacttgggaggctgaggcaggagaatcgcttgaacccgggaggcacaggttgcggtgagccaaaatcacgccattgcactccagcctgggcaacaagagcaaaactcggtctcaaaaaaaaaaaaattagccaaacgtggtggcacgcacctgtagtcccagatactcaggaggctgaggtgggaggatcacttgaccctgagaggcggagagtgcagtgagttgagatcgcaccactgcagtctagcctgggcgacagagcaagaccctgtctcaaaaaataataataataaataaaaataaaaaataaacacaaggagccccactgtcttaccccacaccttgcgctttcacaggctcacacttccttcaggtggcggagtccctcacatgatgcagtgaagggagatgtggagtcttgctgggtcgcccaggctagaatgcagtggcacaatctcggctcactgcaatgtctgcctcctgggttcaagcgactctcctgcctcagcctcctgagcagctgggactacaggcctataccatcacgcctggctacatttttgtatttttagtagagacagggtttcaccatgttggccaggctggtctggaactcctgacctcaagtgatccacctgctttggcctcccaaagtgcagggattacaggtgtgagccaccatgcccggcccaatttgcttttttcactcagtgttttagtttattcatattgatatgtgcaacattagttcattttcattgatgtacactatcccacatccaatatgtaaaacataatgcatccaacactggtgtcttattttccaacatgaccacaatgcgagttctcatcccacatgctcttcttacaaggagatgttgacttcctcttactgagaagtgggatctatcatgcctcctcctgaatctgatgggccagtgactgtggcagaagtgaagccctgtggcttccaatgctaggttagaaaaggccatacagggctgggcatggtggctcacgcctgtaatcccagcactttgggaggccgaggcggtcggatcacgaggtcgagatcgagactatcctggccaatatggtgaaaccccatctctactaaaaatacaaaaaattagccaggcatggtggcgggcgcctgtagtcccagctacttgggaggctgaggcaggagaatggcgtgaacccaggaggcggagcttgcagtgagctgagatcgcaccactgcactccagcctgggcgacagagcgagactccatctcaaaaaaaaaaaagaaaaggccatacagtttcctctggctctcaagaagctccttcttgaaacccagctgccatgctgtaaggaagcacaggccacaggaagaagtcatgtgtaggcattctggctggcagcccaagctgggccccagataagtgccagtactggttaaccaccaggtatctgaggaagttttaagacgacaccaacctcagccaacatcttactaaaatcacatgagcgcccccaagtgataacagcctaattaagtccagtcaacccctgggactataagagataataaaatgattgttaatttaagccactaagttttggggtgattagtgatgcattaggtaactggaacaactatgccacaatctgtccattctccagttgctggatatttgtttccacatttatgctattacaaacagcactgctgtgaacattctcatacatgtcttttgcatgtacgtggaagtttctccagggtatatatttgctaggagagtaactgctgggttggaaagtgtgtcaccttcaactttaccacaacctaccaaactattttccaagatggttggtaccagcttacattccatcagcaaagtatatcctcccattactccaaatcttccctaacacttgagacttaaggtttttgccagtctactgggtgcacaatggtcttatttcatatccttttaaggactggaattttgtactgttcccatgaattaatccaaaataagtgcttaaacctatagtaatgttgcttttttaaattttttattttttcgagacaggggctcactctgttgcccaggctagagtgcagtgtcgtgatcacagctcactgcagcttctacctgttgcgctcaagtgatcctcctgcctcagccacccaagcagctgggactacagccatgcgccaccacgccgagctaatttttaaattttttgtagagatggagtttcaccatgttgcccagtctggtctggaactcctgggctgaagagatctgcctgccttggcctccccaagtgttgggattacaggcatgagccaccatgcccagcccgcttttcctttttaagaatgatttacacattggggttccatattaaggcttcattttctaaaagggagttgtcactgggtatgatggctcatgcctgtaattcctacaattacaggcaagaggcaggaggatcatctgagtccaggagttcaaggctgcagtaagctacgattgtgcctctgcaatctggcctgggtgacagagcaagatcctgtctccataatcccagctactcgggaggcagaggctgcagtgagattacaccactgcactctggcctgggcaacagagggagactctgtctcaaaaaaaaaaaaggtatagaaaaaaagaagggaggctccagtagcagccaagcacatctcatgcctagatcttggtttccaccactgttctgcaattaaaaggaccaggctccttggaaaaatggttggctccaggactggggcaggaaatattcaagatgagcctgcagcatctctagagcctgaaagtaaggacacagtaaaaacaaaaacaaggctgggtgcggtggttcacgcctataatcccagcactttgggaggctgaggcgggcagatcaactgaggtcagaagttcaagaccagcctgaacaatatgatgaaaccccatctctattaaaaatacaaaaattagccaggcatcgtggcatgtgcctgtaatcccagctactcaggaggctaaggcaggagatcacttgaactcaggaggcggaggttgtggtgagctgagattgcaccattgcactccagcctgggcaacaagaacgaaactccgtctcaaaaacaaaaacaatgggagtataacaagtcaaagggactctggaaccaactgaaagagctccccatggccaaagtcagactaatgtgagtgacaaaataaagaaagtaacgttggatgataacctcaaatacaaagtaaatatccctgagtccaaactcataaaaataaatgactaagttactaaatgaggagaagagacacatttcctttgcagaagaattccaaataatttatgtaaatcccttgcccccaaggagatggagcataaaccccccaactccttacatgcaggctgtgcagtgaattccttccaaagaggacaaggtgtaaagggagaaagaagagtagctttacaaagtggagaaacttgacaaacaggtgatcaggatgaacaaaaacagtggtgaatcatgtggtcagtgtgtccccttgatatgtgatgaaatgacacttcccctttgaggtcttcctccaaaaaacacgtaactccagtgtaatcatgagaaaaatatcagacaaatcccagctgaggggcatcccataatatgtctgaccagaactcttcgaaactatcaaagtaggcatcaaaaccaaagaaagtctgagcaactgccctagccaagaggaacctaaggagacacgacaactccttacttgtcaatataaatgtctggagccagaatgttatcaaatttgataacataatgtcatatgagatcctggaacagtaaaatacattaggcaaaactaaggcaatctgaataaactatagactttagttaatactaatggatcgatattatttcattaattgtgacaaacgtaccaccccaatgtcagatgtcattaatattaggagtaactgagcgtggggtatacagcagctctctgcactatcttctcaattttttctgcaactctaaaactattctaaggccaggtgtggtggctcatgcctgtaatcccaacattttgggaggctgaggtgagtacatcgcttgagctcaggaatctgagaccagctagggcaatatagtgagacctcgtctctacaagaaaaaaaacaactggccgggcatggtggctcacgcctgtaatcccagcactttgggaggccgaagtgagcaaatcgcctgaggtcaggaattcgagaccagcctggttaacacggtgaaaccccatatctactaaaaataaaaaattagccaggcatggtggcgcatgcctgtaatcccagccactcaggaggctgaggcaggagaattgcttgaacccggcagacgcaggctacagtgagccgagatcaccccactgcactccagcctgggcgagagagtgacactccatctcaaaaaaaaaaaaaaatttaaattaaaaaattagctgagcatggtggcaggtgcccgtagccccaggtactcaggaggctgaggcaataggatcacttgagcctggtaggtggaggctacagtgagctgggatcataccactgcactccagtctgggtgacagagcaagcccctatctataaatgaataaataaagctgttctaaaaataaagtctattacaaaaaaaaaaagagagagagagagagagatttagccctgattttgcaaagggaaatgtctcctctgctgcaggaccccgacaggccttcaaagttgggtctatagttgcagcacttgccaaactaactcaggtcagatgcccaaaggaggggtggaggtggctgcagctcaactcttggctcatctcagcagcagggggcttgggcactggagaaaggggggctgaggctggcccaggccttggccacttgccacagatactgctagtttgcatctggctttagtatccactgatgtgggctaccagaggaagggatgtgtccagaggtggccttgtctcagggcgaccatccacacagaatcactctgctgggctgctgcaggtctggttctgccattcagcatgagccctgggctcgctgcaccaccatctcctcatccgtttatgggatgagaataggaagaccctgccttttatgatgttgccctcaggattcgacaagtccaacaacttagccaagcgttgatttagtacttcctggcacacaggtggtagtcaacgttagctctcagcatcccctgacccaactcctccagcggtctccagctggaagagtccaactgctcttcattcctttatgaaatggggtggtcactgtgtaaataaatcacctgaaggatgccaatcatcttggaggagaggctagttcagatctgcaacggactcatcaccagtatttgcacttaaataatgtaatgtaataatgtgttcttcgaagtcacccctgaattgatcccatgtgtaaggaaaattgttcattctaggactacttgtaatagcacgaggtaggaaacaacctgaatttccttcaaaaaggaactggttaaataaattagactactaagacacgtgtatgcttgtacatggatcctatatgctcctctgctgtgtgtgtgtgtgtgtgtgtacatctcactggaaagattacacaagaaattggttaacatttgtagtctctgaggaagggactagggggctaggagacatgggaagatacttttcactgtagagacttttgtatcttttgcattttgaaccatgtgaatgtattcttaatttttttttttcgagacaagagtcttgctctgttgcccaagtggagttgcagtggtgcgatcacagctcactgcagcttcaacctcctgggctcaagggatcctcccacctcagccttacaagtagctgggaatacaggcatgatccaccaaacgtggctgtgaatgtattatttatgctcaaaaatgcctaacagacagggcatggtggctcatgcctgtaatcccaacactttggaaagctgagatgggaggattgcttgagactagtagtttgagaccagcctgggcaacatagaaagaccctgtctctaaaaaactaaaagtaaaaagtgcttaatagaatcagtgaaaaaaaaaaatctacccctgtgggtcatggctgttggggcgggctcgggagaactgccaagtcaaatgtataacgggtgggccactgtgactctggagcagctgggaggtggaggcggcatcggctcaggtcacaaggatgtggctctcaaggcgagcagcatcctagctgcaaatgcttcctaggacaagccaataaggttggtgcggacatctacacatggacaactctagagagtccaaatccactgttttttttttgtttttttttttgagacagtctcactctgtcgcccaggctggagtgtagtggtatgatctctgctcacggcaacctccgcctcctgggttcaagtgattctcgtgtctcagcctcccaagtagctgtgattacaggcgtgcaccaacacaccggccaatttttgtatttttagtagagatggggttttgccatgttggccaggctggtcctgaactcctgacttccaagtgatccacctgcctcagcctcccaaagtgctgggattacaggcgtaagccaccatgccaggtccaaaatcactgtcttaagacctccgccttgacccttctccaaaagggctatgtttcaaatctgctatcaaggcagcccaggtggctgggtgcagtggctcatgtctgtaatcccagcactttgggaggccggtgagagaggatcacttgatcccaagagttcgagcccagcatagggtacatagtgagacctcgtctccataaaatataaaataaaataaaaatttttaaaaggcaccacagggtagggattaacgggcaaggattctgaagtctgctccctggggtcaaactcagtcctgccacccgccagctgggtgaggccttcagcagttaactcccctctctgtgcctctgtaaagcgcaacaataagagaatctccctggcacagctaaaccctgtgtggtaaattacctatatatgtttttatatcattgcagttcctattacacattgagaaattaccatggctcttaaatttagcaactggaactcttccagttcaccccagcagttgttaaaattacctatgaagtagaatcagaggaaattattaggaaacaaagaaggctgaagctcagcagggaaagtgcgcatgtgtgagctcttcctggtggcaatgacctgaaggggcggcccctggaatctgagggccagcatttgctgtcctttgaggtcaggcctcagccagtctcaggagggtctagcctgggcccccacagagaaaggcatctattactgctctctacagttgtccctcatcctgaagtccggcccttcacaccccatccccagtgcctgggacactgcatgacacacagtcagcccccaatatgacgtaactgaaaaactgaaaataatggatttaggaagatgaaagaagttctggagatggatgatggcgaagggtacacaacagtgtgaaagtacttaatgccactgaatggtacagtttaaaatagttaaaatggtccaggcgcagtggctcacacctgtaatcccagcactttgggaggctgaggcgggcggatcacctaaggtcaggagttcgagaccagcctggccaacgtggtgaaaccccatctactaaaaatatgaaaattagctgggagtggtggcaggtgcctgtaatcccagctaccagggaggctgaggcaggagaatagctggaaccctggaggtggaggtttcagtgagccaagatcatgacattgtcctccagcctgggcaacaagagcaaaactctaactcaaaaaaaaaataaacaataaaaataaaataaaatggttaaaattgtaaatttcacgaggtatattttcacacaatgaaaataaataaataaacggatgagatctagtctcatctttacctgctctctcattaattctcctccaaccccctgacctctcctaggctgtctctttttgtcagttcctgttctctaaacagggaaagggccccagattccctccaatctctatgatccctttccagctggtattaccaggcccttggctttttttttttttttttttgagatggagtctcgctcttgttgcctaggctggagtgcagtggcacgatctcagctcactgcaacctccacctcccgggttcaagcgatcctcctgcctcagcctcctaagtagccgggattacaggcacctgtcaccacacccggctaatttttgtatttttagtagagacggggtttcaccatcttggccaggctggtctcgaactcctgaccttgtgatccacccgccttggcctcccaaactgctgggattacaagcgtaagccaccacgcccagccaaggcccttggctttgattccagctgtaccctgcgcactgtcagcagccatgaacccccagcccaggtgtccgcctgagccccagcggggaccctaacaggcgcaatgcagtcagaacacagctccctcttccttgaccttcctcccgtctccccttctctgttaacagccgttcccccagatgctccggtctaacatctaggcgggccctatgattctcatcttctctagccccaacttccaacccatcagcacatcccacagctcttcctccaaagcacaccctaagcagcccaagcggccctcttccctgctccccactgccatgccctcgcagccatcctggcttcctgcctggactgctgcagtggcatccaccccagccctcccagccattccttctcctcacagaagccagagcgatgatcctaaatgaaactcagctcagcacatcccagctccaaatcctcccgatccagcactcccgggtcactgtgcacattcctcctccttgatcacaacacccccagccacctagcccctgcccacccacctctgcctcatgctggaggcagggcccaccctcacccacagccaccagccttcttcctgttccttgtcccacctcagcacctctgcccctggctgtccctctgtctgaaagctctcctcctgaacttcatgaagccacattcccaacttggcctccatgtcaccccttctgcaaggccttcctatccacaaccactgaagcggccctggccactttctcccactcctcagattccttggccagcaccaccgctttacctacaccccatccctggagaggccctgctcactacctgctaccagctcctaggacaggcctggctcaggggcgctgtgcagcagggaggggtgggcgaccaaaccagtggaaactcatggtctcacaaacggagcccatcatttggaaaggtgccagcaggcaggtgaaatccatggggggaggggatagagtgacaaaaccactacggcttattgggggcagggggcggcctaactgaatggtgactgtggccattactccccctgactcagggcttgcagcagggacatggaccatgtgtgtgcaggaagcctgacctttagagacacagcccaatcctctgccaccatccccagcccagctgcgcatagtgtgaaacagtcctgcaactcaccctgaaggagtgggggaaatgatttgaaagtcacaaaaatatattaaaacagcagctgtcttcactctaggcactggcctcccttcccagtgccccttgcccaccacccgccatacactttcagagacagatgcccagggcaggaaaacggatgcgcctcagccgcagcccagggtctggagaggtccctccagcctgggagtagagggcggctaacagtctcaacaggctcgacgccaccgccgacgagggggccgctgggaggccggaggtacaggagggtcgggcaggacgcagcggacagtcgggccttgccacggggacagaaaacagaagagaaatgaacaaagtgaagacagggagagagagaagtcacagcagtggggggaggcgcagaggagtgagggaggtcagtggggagtgggggaagggaggcccaccaggtgacacccacttagttgagggggacagggaggctgatgagctggggtctgaggcagcagaccctgctcaggggaagaaggggaatgtaggagaggaagaagccccctggcacttgggagaggtagaaaagtgggttctgccaaggccacagccagagaagaaagcacagaggacatgagagaaggggagtcctggagcaggccaggccagctgcgacgaccatcccaggctaggagaaatggggtgatcccccgaatgctcgggcctagctctagagcccgagggagacaagctgtgtcatccaggagctggtgggaggcgtgatgaagccaggagcctggggcggccagggcagatgcccgcaggctctgctgcctgcaccccgcccacaggtgggctagaaggtcctgcggcccagtcttttgaacacgctcacagtgcccgcgtggtccatctgggcaccaaggccctcgctggagctgctcccccggggccccaccagagtcctcttaatggtgaccttgacctcggctgaggacttactcttggtgctggtgacctggctgtcctgggcctcgggcacaagggcagctgcgcccagtctcttgatgatgctgactttagacaaggactccggcttcctctcaagcccagaccgtgaggaaagcgccaggcgccgcagtgtcggggcagcagccgttgtcgctgagcttgtggccttggctttgacagtcagtgctggctggggactggccttggctgggccccgtcctagcttcttcaggaccccggcatactgcaagacagagctgctgctgtcattgtcgctgtcccaagccagatcctcgtccgtttctggggtggcccccaggcggctgaagactcctgtgggctgtggaggtcagagacaggatgaatgagtcactgagtcactcaacacacattcatggagagctgcttcctctgtgcctggcctcctgggactcacagttgggagaaacacccatcactgacaccccagatagtggcgagagccatgatgggggagtccaggggactggaggagcccagaggaagtacctgaccttcctagaagttcagggagggcgccctgagaggggggacatctgagctggaagtaggtctaagaaagagggaagaggacgggagtgccgcacaaagggaatgtcatttgcaaggtcaataggtgggcatgagtggagtggagagattaatctggtcattcactccacgaatattttgagtcccaattctatattgtacctggtcctaggccggcagtgctagggacacagtgatgaccaagacagcctcagcgctgcccgcatggggctcacagtccagtggggaagacaggcttggcatcagaaatgacacaaataattctgcaagaatgacagtaacgcattctagacggagaaggacagctggagggcagaagacaggggtggctcctcatcagtccagaggaactttccctgaggcaccaactttgaagccaggccctccaagatgaattagcaaagaaaagagtatgtgctatgccctgaaggcaggaagtataatcctatgtattgagcactcgctatgcgcccagctcttcatagggctggaacttccagccacatgatcccgagtgttcccatcctcctcatggtaagattcttggaagtgagcaagcccgagttgctgcaccctgcagagcaggacactggcaggcaggaaacgcagctgggaggctctgcaatagttcaccaacaggcgccgcacaccccagcaccatgcggggatgatcttaactctacagccatccttggaggtgggtctatacagatgaggaggctgaagtacaaaggacttaagtgacatggccaaagccacgcagtcaggcccctgtgggcttcagggtgtactctgagctacacaccaggcctggggcctgtgggactgcgggccgcggcaggaagtacaggctgcatcatgggcacagtgaagagcctctgcagggcttccagtgaggggacgggccctgtcctgtgggccgcacacactgctgctgtggggataggggctggggtccatggtaactgtgcgagaccattcaggaggctatcatcctatcctgacagggagaggtggcagaggagggagagacagtagagtcatcagacccactgacagactgcaatggggagggcaggcagccctcagatgggggcccaggagagggctgacttggggaaagacactaagaccagttggggacatggtgggtgggaggcatccaggagtactggacccccagggctggaaactgggagagaagccagggcagaagacagatgggaaagccgccagtgcaaagccaggaactgaggctggaaaggcaggttagacggccctgggccgagtgaggttgagatgtgttaaagagtcaggagcaccgctcagggaagacaacagctcgcacgcccagaatcgctcccccatccccactcactttactccctgtcgtggtgtctgccttggtctcggcgccgaggcggtcaaacacagacgtcctatggagacctgggagggaagtgaagccatcagggagaggccccggtgggccaggcctaggctgagctctgtacagacaccaaggcagcccagacaccagtagctctgggacaggcagggccagactgtgctgagttgggtgttatgtctacactgttggctcacactgaccctaacccacccctatctggctagagccaaatgtgggaaagaccagctacaagtggcagattccctacacctcagcactagctcatgaactgtgtgcacgggaagagttcttagtgcctgcatgttcctttcacttcttggggtcagggacctctgagagaatctgatgagtggtagtgcatcctcccctaaattataacctaatagccatcaatagaatggttactaaattatggtatatgaatactctggaaataataaacaaccattgaaaaaagaatgaagaagatctacctgcattaatatgagaagatctcaacaaaaaatttatggaacatgggccaggcatggcagggtgtacctgtaatccctttgggaggctgaggcaggtggatcacctgagcccaggagtttgggaacaacctgggtaatatagtgagaccccatgtctaaatatatatatatgaacaaaaaagttatagaacatgccaagagtggtgactcatgtctgtaatcccaacatggtgggaggtggtggtgggcagatcgcatgagcctaagagttagaaaccagaatttaaaaattagctgggcgtggtggcccacatctatagtccctgctactggggaggtaaggtaggaacccaggaggtcgaggctgcagtgagccgtgttcgtaccacagcactccagcccaggcaacagagcaagactctgtctcaaaaaaaaaaaaagaaaagaaaagttaggtccaggcatggtggctcacgcctgtaatcccagcactttgagaggccaaggcaggtggatcacccgaggtcaggagtttgagaccagcctggccaacatgatgaaaccccgtctctactaaaaatataaaaattagctgggcacggtggcgtgcacctgtaatcccagatgcttgggagactgaggcaggagaatcacttgaactcaggaagcggaagttgcagtgagccaagattgtgccactgcactccagcctgcgtaacagagcaagactccgtttcaaaaaaaaaaaaaagttatagaacaatacttacattttaaacacaaatactatttgtgtttaaaaaagaaaaactaggctgagtgtggtggctcatacctgtaatcctagcaatttggaaaggtgaagcaggcagatcacttgagctcaggagtttgagaccagcctgggcaacatggcaaaaccccctctctacaaaaaatacaaaaattaggtgggcatggtggcatgagcctgtagtcccagctactcgggaggctgaggcaggactgcttgaacctgggaggtcgaggagactgcagtgagttgacaaggtgccactgaaccccagcctgggtgatgaagtgagaccctatcacaaaaaaataaaaattaaaactaaaaaacaaaaaactgcctatatatgtgttatgtatgtacctagatgctggtctggaaaggttaacaagagacggggatatgggagtgagggaaaagagtttgtttttactgaatatgtttctgtatcatctgaaagtgctggagttacaggcatgggccaccgcgcccagcctttttaatagagataggggctcactatgttgcacgcttgaactcctaggctcaagcaatcttcccacctcagactcccaaagtgctggaattacaggtgtgcgtcaccacacccgaccaagagatcatctctgtactccaagtcagaaggcctagctttggactatatctccactcgtctcctctggttcatattaacggtgccactttggggtatttgcccttggccaagcacagccactcattttacagcaggccatcactctatcgttgctcctgccccttggggaagaggtgccaaggggcccagctacactaactgcaggatcagagggcagaggtgatgtatttccctcctctgcagccaccatcactgtccccttggcctacggctcctgcatccccgttagaacctgcttctcagccaccgtctgtaggatatgacgggccctgtgtgatgcagagggagggacatggaccccgcagggaagcatgcccctgatgggccagtaccttttgcagcctgctgctgctccaggatcttgcgggtgcggggtgtggtgcctttgggcatgttgatgacgtacttcccctccatctcagcagtgacccggcgccgcttggcaggaacagccaggctctcctcctcccggcgggccagggctgctgggggaagaaagcaggggtatcagcactctctgagacagaacgttctcccaggatggaagctggacactaggtgtcctttatctccacacattcatgactggaatcccttaccttcccaaccacccacatcaccactgaccgaaccacagagaaactcaggtctctgttacacgaggtcacagaaggtgctcagaatccccaggctgtggcaggcctcccaggctttctgtggctctgtccctattccaagcaggcttctggcccagcccagcccacatcccctcggatggggaacctgctgggtggtggaaaggttctagagctccaagcaggcagtgctttatggctgcactcacttgtcaacaagcacttgagctgtgtacacttatgagtggtggattgtgcataagttacacctcaatttaaaaaatgaatcccctcaaacgtgttaagggttaaaagagccagttgctcccaggctcgccatcttcgcaatactttgttacactgattttaacttttttttttttttttttttttgagactgagtttttgttcttgttgcccagtctggagtgcaatggcacgatctcagctcactacaacctctgcctcctaggttcaatcgattctcctgcctcagcctcccaagtagctgggattacaggcatgcgccaccacgcccagctaatttttgtatttttggtagacatggggtttcaccatgttggtcaggctgctcttgaactcctgacctcaggtgatccgcccacctcggcctcccaaagttctgggattacaggtgtgagccaccccgcccagcctttttttttttttttttaaatgtagagacagggtttcatcatcttgtgcaggttggtcttgagctcctgggctcaagtgatcctcctgcctcagcctcccaaagtgctgggattataggcgtgagccaccatgcccagcctgattttaacttttttgcttgtggcacacaaatcaaaggccagaagagggtgaggcacttccaaacctgcaggacaaaggggagactttgtgatggaggtggacggggcgtgataggagtgggtgtcagaaacatgaagcgccctgggcctcagtttccacatttgccttatgacaccatgaggtcattgctgtggggatgggtccagcaaaggcttaagagcatggtggacgggaaggcctgggagcccagtgactgcaggcccattcccagctctcaagctgagacctggaggaggacagaggccaacatggagcagtctgggaaggaagagtgctcaggccaaggggtcaccaggagcaaaggccccatgatgggaaggaggctggaggggagcaagcgagcatgcaaagtggggcgatgcaagagatgaatctacatgatgcagggccctacagaccatgtggggaagatggcctttattactggaataatggggagccccggagagttacagcccagggggttacaggatcagactgaaggttttcaaggatggatcccttggctgctaagaggaggcaagaggttcttaacctatgaccccaggcatcaagcacagagctgtgcacaagtagggggctcggtgaagacctgttcacaaagcgtgaacccctgagtgagaaggcaatgcacacatgcctcaacacaccaactcaggtgcttctgtccatcctcctgggtggggtatcgccaccccccatgctacagatgaagaaagtgaggcccacagacgtatggcaccttgaccaagtttacagaggtgattcaggttcaaatgttttgtataccttgtggccttcaaagcaccttacaatattggaagcatgacccccaacacctcctaccaacccacgttcccctccagctcctcctaccacctgcccatgttccctcaccagtggccttggcactctttgctgccatcttgttggacacagtgaccgagatcttggaggtgctggtgtccgggcgcctggggggtgtgctgggtggagagtcatggttcaggctgttggtgatcattcgggaggcagctgtggggagaaaaggagagtccggtcgggtggggtcctggaagacaggcctcaatccagcagtctcagggtcaggatggagaaggtgaggcttgagactgaatgagaaggtcagcgggtatcaccctgtaactgcatggtactcgtgatggggatgcttgggggcagggtgggctgcatctccccaggaactagcccatccctccctatcctgggagcctttcctgaggctctagaccacactagttctgatcacacctcacccatcagtcacccagcctcgtgctgagttcgcttcgcccctcccggagctgcttcagccatgctggtctccaggatcttcctcacctagcaagtaggcgcttcctcagggtccctgctgttccttctgcctggcatgcagttccccaagcacagcggaattgctgcgtctcatcattcaggcctcctctctgatggcaactcctcagagaaaacttccctgaccaccccatcaaaaacagcacctcctcaacctctatcacccttacccactttcattttcttcacagcccttacaactgcttgacattaaactctatttgtttactggtaaactcactcacaagaacataagctccacgaggaggctgtgtctgtttactgctgtatcccagtgcctaaagtggtttctgaggacaggcacaagggcgcatgcctgtaatccctgcactttgggaggcctagggggatggatcacttgaacccagttcaagaccagcctgggcaacatggcaaaatcccatctctaccaaaaatacaaaaaatcagccaggcatggtggcatgtgcctgtagtcccagatactcaggaggctgaggcaagagaatcacttgagcccaggaggtcaaggctgcagtgagctgtgatcgcactactgcactccagcctgggcaacagagtgaaacccagtctcaaaaacaggggggaaaaagaaagaaaactacattaaaccatcacagaacatttaataaaacgtgacccccaagcacccagcacccaggcatcatgacattattggtacccagaagtcccaggacagatccttccctatcagacctcctccctctctgcaggaagaaattcttggttttcaggcctgctctctctcctctgttaataatataccccagcacttcttcagacatttttcaggttggatgggtggctttatgtctaatggctgcaaactctctggctatgcagaatctgtcctgtgagagcctccattcacaatactctttacctagctgagtgcaataggatcaggattttctgctataaaaggcaagctgttaagagggccctacctgtcctgctgtacccagagggaaatctgcagctgaaaagatgtcaggaatgtgatgctttattgtcatgacaggcaagccccatttgggtggcggttaagcaaccaactctgtctttactctgtcttgcatttgcgttgcagtcaggatatcagaatacaaagaactgttctctttcccactcctgacagacacatcattcaatgttctaaagtgtgtaaaagtgatcatctcaggaatgtttttagagcattcttcccacccctttctttctttgcctgtttccccttctctttttatttatttattttcatttactttccctttcttttttttcttttttttttgagacagagtctcgctctgtcgcccaggctggagtgcagtggcgcgatcttgactcactgcaagctctgcctcccaggttcacaccattctcgtgcctcagcctcccgagtagctgggactacaggcgcccatcaccatgcccggctaatttttttgtgtatttttagtagagatggggtttcaccatgttagccaggatggtctcgatctctcgaggtctgacctcatgatctgcccaccttggcctcccaaaatgctgggattacaggcgtgagccaccatacccggccctcttttttttttttttttttttttttgagacagggtcccactctgttgcccacgatgatggagtacagtggtgccatcataactcactgcagcctcaaagtcctgggctcaagcaatcctcccacctcagcctcccaagcctcccacagctaatttactaatttttgtagagacagggtctcactatgttgcccaggctggtctcaaatgcctagcatcaagtgatcttcccacctgggcctcccaaagtgctgggattaaaggcatgggccaccatacccagctgaacatttcatttataaagatttgaaagactggtaaaactaatgtgtgctgttagcaatcagggtagtgggtaccctggagacaatgtggtggctgggagggggcacagggggattctggcaggctggtcatgtttccattactggatttgggtgctggctacatgggtgtcccatctgtgaatggcaccccactgtaatattatgggtgaatgcttttctgaatgtatgttatggaggagtgttgcagaaacgaaccctaatttgctcagcttctttgcatccacatctttgggtaggccctacccacaatgactgtggacttagccatgtaacttgctttggccaacaggacaagagcaaatgttgtgcaagcagtggcttaagaggtgctttgcacactggggccagccctcttctgctgcttttaggaaccctgcaaccaccactgtgaacaagcccaggctagccagctagataattatggacacgtagccaagtcaccctgtgggcccagataacatcaggacaaccatcagatatgtgaatgcggccgtcaacccggcttcaacctagctgccaggtgaccactaaaatcagctgagctggcctagagcagaactgaccagccaacccacaaaatcatgagaaataaacacccatgttttagcaagacatggtggcttgtgcttgtaatcccagctattcaggaggctgaggcaggaggatcacttgagcccaggactttgaggctacagtgagctatgactgcaccactacactccagcctgggcaacagagtgagactcccatctcaaaaaataaaaatacatgtctgtgttttaaagcacagttttgggcggcttagttatcagcaaagggaagctaatgtgtatattaaaattttaaagtttatttttaaaaaaggtatctgtcgggtgcggtggctaatggctgtaatcccaacactttggggggccaaggtgggtggatcacctacagtcaggagctcgagaccagcctggccaacatggtaaaacctcatctctactaaaaataacaaaaattggctgggcatggtggcaggcacctgtaatgccagcaactcaggaggctgaggcaggagaatcgcttgaacccaggaggtggaggttgcagtgagccaagatcatgccattgcactccagcctgagccacaaaagcgaaactccatctcaaaaaaaaaaaaaaatggtatcatactgcttttaaaaaccaaaaatagccaggtgcagtggctcatgcctgcactttgggaggctgaggcaggtggatcgtttgaagtcaagagttcaagactagcctggcaaatgtggcaaaactctgtctctactaaaaatacaaaaattggctgggcatggtggcacacacatgtaatcccagatacttgggtgactgaggcacaagaatcacttaacctgggaggcagagtttgcagttagctaagcgtgccatcgcactccaacgtaggcaacacagcgagactatctcaagggaaaaaaaaaaaggtcaggtgcagtggtggctcacgcctataaccccagcactttgggaggctgaggcgggtggatcacctgaggtgttcaaaaccagcctggccaacagggtgaaattctgtctactaaaaatacaaaaattagccaggcgtggtggcaggcacctgtaatcccagctactcgggaggctgaggcaggagaactgcttgaacccgggaggcggaggttgcactgagccaaggtcgcgccactgtactccagcctgggcaacagagggagactccatctcaaaaaaaaaaaagaaaaagaaaaaatataaatacagtcaatactcatcattcatagattccatatttgcaaacttgcctactcattcaaatgtatttgtaaccccaaaatcaatacagcagtgctttcactgtcattcacagacacacacagagaacattttgagttgctccagacacgttcccaaatgaggacaaagaaggcattctcaccctcttatttcaggtcccgctctgtaaacaagcatcctttgcccagtctacttgatgtcatgaatgtgaacatttttcacatttttgttggtgattttgctgtttaaaatagccccctggacgggagcagtggctcacgcctataatcccagcactttgggaggccgaagcaggcagatcacttgaagtcaggagttcgagaccagcctggccaagatggtgaaaccccgtctctactaaaaatacaaaaattagccgggtgtggtgacaggtgcctgtaatcccagctacttaggaggctgaggcaggaggatcgcttgaacccgggaggtggaggttgcagtgagctgagatcgtgccactgtactccagcctgggcaacagagactccatctcaaaataaataaataaataagaaaataaataaataaataaataaataaataaataaaatggccctcaaagcacagtgttgaagtgctgtctggcttcctaaatgtaagaagggtatgatgtacctgatcaaaaaaatgtgtgtgtgagataagcattgtgcaggaatgagttacagtgttgttggctatgagttcccggttaatgaaatcaacattatgtattaactacagtgcctttaaaaggagacacacataaaataaagctatatatttgacgacaggcttgcaggaacctaacctagtatttcccataggagcaacggattctccattgctctgtatttcttctaggagctaagaattcactaagtgtacatattaactttacagaacttaatgaccacagatgacaattgactgtgtgtacagccattcactacccagtttattttttcccctaaaagaagagtaagaattcctccaatggctttgtttctacctttgaaaattacaggcggggatgggatggccagacgtgtccccttcactgacagggtataaaaatcaaggaaaagaggcctgaatagttaggactcaccactggtgccacggcgaatttcgcctgcaagggggctagggctgcagggtactgactcagtggcagctttgcacatgtcctgtgaaaaaagaacaggcacctgggtcaccacagaagaatcatgcatcaacctagagatctaagcaacaccacaaggatcaacacctgactgctagagaagattctaacacatttcactcctaaccataagaaagcatcagatacctccaaactgagggacactctataaaatatctgaccagtatattcagatatatatatctgaagttcagcctcctcacctattgaaaaaataggccaggtgcggtggttcacgcctgtaatcccagcacttcgggaggccgaagcgggtggatcacctgaggtcaggagtttgagaccagcctggccaacacagtgggacgcttatctctagaaaaaattaaaaaactagccaagcatggtgtcacacacctgtagtcccaattattcaggggctgaggtggtaggattgcttgagcccaggagtttgaggctgcagtaagctgtgattgtaccactgcattctagcctgggcaacagagtgagaccctgtctccaaaataggtgaaagatggccaggtacggtggctcacacctgtaatcccagccctttgagaggccggggcaggtggatcacctgaggccaggagttcaagaccaccctgggcaacatggcaaaaccccatctctactaaaattataaaaactagctgggcatggtggcgcacgcctgtaatcccaatcactcgggtggctgaggtacgagaatctcttgaacttgggaggtggagactgcagtgagccaagacagcaccactacactccagcctggcaacagggcaggattctgtctcaattaaataaaataaagaggccaggcacaggggcacatgcctgtaatcccagctactcaggaggctgaggtaggagaatcacttgcacctgggaggcagaggttgcagtgagccgagatagtgctactgcactccagcctgggcgatggagtgagaccctgtctcaaaaataaataataaacaagtgaagaaaggaaggaaggaaggggggtagggagggagggagggaggaaggaaggaagggagaaagggaaggagggagggagggaaggaggaagggaaggagggaaggagggagggagggagggagggaggaagggagggagggagacagtgcctggcaggccacagcaagtgcttggtaagtgttagctattatattaatcacttaatgagtacagcactccaggtctggtgctcaaggccacatatactatctggtaggtggccacagccacactagcatcagggctgtgtgagaagcccatttcaaagagatccaggaaggtgggtcactataagtggaggggtcaagactggaatgtccaggttgtgagccaggttgccatctgggtcccacataggaagctgctgtcctggagataatacttatcacaaggaaaatgtgaagcagcaataatagttattacagagggacccaaatacaggcagtttccactgtgctagtgcttcacatagcttaatactcacaaccagggctgggagcagcagctcatgcctgaaatcccagtattttgggagaccgaggcaggaggatggcctgagcccaggagttcgacaccagcttgggcaacatggcgagacaccgtctcaaaaaaatatatacaaccaccattcaagattttttttttttttttttcttgagagagtctcgctctgtcgcccaggctggagtgcagtggtgcgatctcggctcactgcaagctccgccacccacgttcacgtcattctcctgcctcagcctcccaagtagctgggactacaggtgcccgccaccacgctcggctaattttttgtatttttagtacagacggggtttcaccgtgttagccaggatggtctcaatctcctgacttcgtgatccgaccacctcggcctcccaaagtgctgagattacaggcgtgagccaccgcacccggccaggtttgcctctctttcacagatgcagaaaatacagctcagagaggttgggcaatgtgcccagcgtcacacagcaaatggctgaaccagccctggaacctgggtcggcctgcctctgctgccaggcctcccattggctctgcaactgaccctccacctccatgccaaacccagagacagaggggctgggcacagcacccacctgacggtgcaccactttggcatgcttgagaatggcgatgatgtcacccaccacggtcacgcccagctcattcattatctccttattgagatccagcagcatgctcttctgaatcctgcagggaaaggtcagtggtgaggccccaggtgggccagagtgggtgggccagccagctccccaccaccccatccccaagttcagcctcctcacctattatccacaaacatcacggcataattgacggcaggtcctggaggaatgccggcttccttaaagaactggatccactcggaagtggctgtggggttggacagggctcattactcacactgtcctctttagagaatagcattagcaaaaccacaatcacagcagctcccacaaattaaatgctcatcatatgccaggccctgcatggagtgctccacacacacatgatggaactgagccttcctgaccctgtgagttaagcagtattaagattcgcctgagttgccgatgaggaaaatgagatagggaaaggttgggcaacccaccccaagccacaatgctaaacaaggggcagagctcccaaacctttaccacagcctttctccttacagctccaccccgccccagtgcttgctctctgcatcactacacatgctgggcccatgactgatttagggtaactgggactctgggttctctgccctagtccccatcagccagcctaggcccagaggatgataggatcctcaggtggctggaaagaagcatcatagagccagcccatgagccttggcaagcccccacccgccacaatagcaaacctccctcagagagaggcatggaagttactaacatgggcttcggagcttgggtttgaatcctaaccctgcgatttccctatggagggactttgggtaagttaactcttggtgccttggtttcctcatctgtaaacctgggataacagatctgacaagtgtttacccagcatttggcaaaggacaggtcctgtcctacacacgggggataccacaaggcacaagatgaagtcccagcccttgtggagctgagattttagtgataacagccccaatgtccttgagtcactgtgcagactcaatgagaacctccatataaaaggctttaaatgatgcttgacccagaggacatcctcaaaccatgacagcaattattattattattattattattattattattactattactcccatcaccactaaacatagagccacagccaagaccaggcagaccccacctatgaaactttattctttctaaattttcttggcttcttggtgggtgtgaccctcaaactgaccccaacctgccaggccaggtgatagctaagatcactgattcgaagtagaactttttttcacattttgacatctctgaaactaggatctacttcatgactgacagtgtgccatagtttaattagcaaactgtttttctttctcagtacatccaataatccatgctattttagattagaagaaatctgttattacctcacccatttttcttttaagacaatagagactcagagcagggaaacagacacacaggtgttacacgagtggcagtgcggggctcaggtgaaactccatgggccacatctccaagaaggcccctgcccagccagccacaggccggttacccagggtgctgactggcccttggggactgaggctggcgaggagctcatgtccttaggatttcctccgccaggccagaggaaaggggtaccatttccctatgttgtgcaggcaccatccacctgctaagccatagggccctgggtcccactgaccagaagcaggcacctctaactatcaacaagcaccacataatgattccatgtatatgaagtgtctagaacaggcaaatctaaagagaaagtagattagtggttgctagggggacaggggaagtgactgttaatgggtatggggttttaatttttttgagacagggtctccctctgtcgcctaggccagagtgcagtggcgcaatcatagctcactgccgtctcaacctcctgggctcaagcgatcttcccacctcagcttctcaagtagttaaactacaggcgcatgccaccaggccaggctaattttttgtatatatatacatatatatacacacacacacacacacacacacaaatatatatatatacacatatatatacacaaatatatatatacacaaatatatatatacacacacacacacaaatacatatatatatatacacatatatatatatttctttttagatggagtctcattctgtcacccagactggagtgcagtggcgcaatctcggctgactgcaacctccacctccgggttcaagcaattctcctgcctcagcctcctgagtagctaggattacagccacgcgccaccatgaacagctaatttttgtatttttagtagagacggggtttcaccatgttggtcaggctggtctcaaactcctgaccgtgtgatccacatgccctggcctcccaaagtgatgagattacaggcgtgagccaccgcccccggcatttttttgtattttttatagagacagagttttgccatgttgcctaggctggtctcaaactcctggactcaagcgatccacctgcctcggcctcccaaagtgctgggattacaggcatgcaccataacaccctgctaaggtatggggtttcaagagagagtgataaagatgttttaaaattgattatggtgatggctgcacaactctgtgaacagataatataaaaaccatcgaattatacaccttaactaggtaaaatgtatgataaatgcattatagctacactaagctgttattaaggggagaaaaaagtaccacgtaggttgggggtagctctctgagccaaagcctatgattgattaattgactgattgactttaaggctagtcaagtgaagcagtaggaagggagaaggaacaaagaaatctgtaactggttgtgatcaattagttgtaaagaccaatcagttcctagggaccaggcaaagcctgtgaatttaaccaagagattactgaaacccagtgtttgaggaattgaaagagtccccacattaagcacacaccatcatttcatgtattgctaaggaaggaaaatatgcagccaattaaactgtcataaggcactggctgtaagatatacccctacttcagaaatattaagttgtgcaatgatgtgagtcttggaatcgatgagatgtggcttgttgcacacaccaggagacacgtacaagaatattcatagcagtttgtctgtgatagctccaacccagtaataatgcaatatccattgacagcagcattgataaacacacggtggtcactctcaaggtgaaatactatacagcagtgaaaagaaagtcaacatagatgacccttagacattatgttgagcaaaagaagccagatacaaaagaacacaaggtatgatttcattcatataaattcaaaaccaaagtctatagaataggaatgtcccactggtaatacaactataaagaaaagcaaggaaggccaggagcggtggcttacacctgtaatcccagcactttgggaggccgagatggacggatcacctgaggtcaggagttcaagaccagcctgaccaacatagaaaaaccccatctctactaaaaatacaaaattagccaggcatggtggtgcatgcctgtaatcccagctactcaatctggaggctgaggcaggagaattgcttgaacccaggaggcagaggttgcggtgagccgagatcgcaccactgcattccagcttaggcaacaaaagcgaaactccatctcaaaacaaaaaaaaaaaaaaacaaaaaaagaaaggtaaggcaagaaaatatgttcacagaatgatttattccatatggagaatggagaagagaggggagtgagattggggtaggactctcggggggctgacaatattctcttttttttgacctggatgggtaatagggtttggatttttcaatctttttatggaactataatgtacatgcaaaaaagtgcacaagtcaatagatcttcctaaaccagacacacctatgtaatcagcacccaaatcaagaaatcaggtatttctaatacctcagaaccctttatattacctttagagtctctactcactccttcccagaggcaaccaccaccttctaacaaaatagattttgcctgcttctatgctttatataaatggaattataaagaatacaggcagccaggcgcggtggctcacgtctgtaatcccagcactttgggaggccgaggcaggtggatcacgaggtcaagagatcgagaccatcctggccaacatggtgaaaccccatctctactaaaaatacaaaaattagctgggcgtggtggcacgtgcctgtagtcccagctacgtgggaagctgaggcaggagaatggcgtgaacccgggaggcagagcttgcagtgagcggagatcatgccactgcactccagcctggcgacagagcaagactctgtctcaaataaaaaggaatacaggccaggcgcagtggctcacatgtgtaatcccagcactttgggaggctgaggcaggaggatctcttgagcacaggagttcaagaccagcccaggcaacatggtgaaaccccatctctacaaaaaatacaaaaattagccgggcgtgatggtgtgtgactatagtcccagctactcggaggctgagatgggaggatcacctgagcctgggaggcagagggtgcagtgagctgagattgcaccactgcactccagcctgggcaacagtgtgagcctgtctcaaaaaaaaaaaaaaaaaaggatatactcagattttgctttttaatcactcttaaaactatacaaatatattttatgggccaggcgcggtggctcatgcctgtaatcccagcacttagggaggccaaagagggaagatcacctgaggtcaggagttggagaccagcctggccaacatggtgaaaccctgtctctactaaaaatacaaaaattagctgggcgtggtggcacgcgcctgtaatcccagctacttgggaggctaagacaggagaatcacttgaacccgggaggtggaggctgcagtgagccgagatcgtgccattgcactccagcctgggcaacaagagcgaaactccatctcaacaaacatacatatataatatatataatatacttttctatattataataaatgtcaaaatttttcaaagccaccaactaacctctgtgccttagcaatccccaaatacagagcttaaggcttgtgataataacaacacctaaggtttgtttagaactatgcccaagcttttacatgctataatctccttaatcccaggatgtgtgaatatcatttccatttcacaggtgagaaaaccaaggctctgtgaggccacgtgggagacctgctggacttcataacccacgttcttcacagctaaactatacagtcaggagagagatccagtgatgaggcgggcaggcctcaagcagttccagccccaccctgccacggtcctcagagtacagctgttcctgccagtgacccagtcctccctcccccatcccatcatcccccaccaaggccatacctcaaaaagggcagtggggagagggggccctggagagaaggccacagactcacccatagtcacggagaccatcgtctccctggccctgacactgctccctggagcctgaaagagaagagaggagagagcccatgagctgctgccggctgtgagtgtttgtccctctcctgtgcctgtctgtctgcatgccagaggaatgttcctgggctaggggctcaccgcccaggaatagcctggagcagctggcaggaagtcagcctgggacagagctgccaccaccatcatcgcttgtgcctgagacaaggcccagggacagcaaatgtccacagctccattcacacacaccccaaaaggttggctggaaaaggagtgcaacagaaataagacacttctggccaagactttaacaataaataccagccaagcatgctggctcatgcctgtaatcccaggactttgggaggccaaggtgggaggattacttgaagccaggagttcaagaccagcctggacaacatagcaagaccctgtctcaaaaaaaaaggctggtccgaaggtagtgaattatctcaattgactgttcatagtcctttacagatggaactccttattctactctttctccttttctcactactgcagttgactagtcttcaaacaaacaaacaaacaaacaaacccaaaaccctattcactgagaacctactatgtgtaaggcacttagggataccaagttgaacaaagccatggaacttagcagctagctgggtacaggggacaggggagacagagagtaaacaagccaaacagttaatatagtacgttaggaagcctttagtgccacggagaagacatggaggacctgggaagggaggggttgtaattttcagcagagtgatcagggaagacctaaagcaacatttagagacctaaagggagggaagcaatgagccatgtggttttacagagaaaaagtgttccagaagaaggtacagcaagtccagcgccctgagccagtggctcatctggcatgctggagggaaagcaaggagccagtgtggctgcagtggagcgagcaggaaggacactgggaggagacaggtcacagaagtggcgacctgatcatgagacgtcccagagaagacatggaaaaccaattttcccttacattagcagatggtagaaaggtggtgttaaggacatattagcaccaatggagactgtctccgttaaaagcagtgttgaatgggaactaaaggaaataactttttcatgtgctgattcaacgctatgcgactccaggatcatggggcccacactgccctggcccaaacttccttcctacttagccctctgcctcttccctgacccggctcctctgccctcttccctcactctgttcccttctatctaccgcagcccccaatactgatcctccctcacccccgcatggggtgcagaagccctctgtcccagaaccttcctgtttaccaccccatacgacctgtcccatcccctaacagattttgatggtataatggagtggtcaagagtaacaactctgcaaccagactgtacagttcaaatccagctctaccacttattagctgtgtgatctcggcaagtgacttcaacagtcaggccgcggtgtcaccatttgtgaattgggagggtgcaaacatgacttaccttagaggactgctataagggctggatgagtttctatgaataaaagcacttgagacagtgcttggtgcctactaagcaccctggaggtgttgtgcctggtctcatcctccaggcctccttccccacacaggtgctttgccggcctcccagtttttagaggatgtcacctgtgcctggaatgcctgtctcctcctggcaacctatccttccttctgctccactgccatctactttgtgacactttccctaagtccccacatatgagactctcttctctatcctcactagggttaatcttgcccttctctggcttctgctcaattttttttttttttttttgagacaaagtcttgctctgtcgcccaggctggagtgcagtggcgcgatctcggctcactgcaaccttcgcctcctgggttcaagcggttctcctgcctcagcctcccgagcagctgggaccacaggcactcgccaccacacccagctaatttttgtatttttagtacagatggggtttcaccatgttggccaggctagtctcgaactcctgacctcaagtgatctgcccacatcagtttcccaaagtgctgggattacaggcacctggccttctgctcaatctcttattgatgagtatgaccacagacatcactctgtcctgtactcaacactcttagatccaatttccctcctgaattttaccactggccaaagacaatacaggccaggagcagtggctcgtgcctgtaatcccagcactttgggaggtcgaggcaggtggatcacctgaggtcaggagtttgagaccagcctggccaacatggtgaaaccccatctctactaaaaatacaaaaattagtcgggcatggtggtgggcgcctgtaatcccagctactcggcaggctgaggcaggagaatcgcttgaacccgggaggcagaggctgcagtgggccgagatcacaccactgcactctagcctgagtgacagagcaagactctgtctcaaaaaataataatgaaataaaatacagtacaacatgcatctctcaaagaacagcacggagaggtctcagtaagtcagacagaacatctcacaaaccaagcactaactatgcatcaggaccagcgccaagcatcatgcagatgcatcccaacagctcagcaagtgaggactattattagccctgtttttatcgatgaaaaaccccgactcattgaggtgcagtcgtttgtcaaatggcacatctagcaactgaccttactgggattcaaaaacaagttcttcctgattctgacgtccagggaataggtcccattgagtgcttactatgtaccaggaactgagcatatacacatctcagtcgctcctcacaaccaccctcggaaagttacagatgagaatggcaggtccaagatcacacagcaaaaggctgggcacagtggctcaggcctgtcatcccagcactttagggtcaggaggatcccttgagcctaggagttcaagatcatatagcaagtaaaggaagcagcaggacttggaccccacgcagtccaatggctatggttcatgctgattgagggattactaccagccaggtactatggtctgtttttcaatgtctcagttaatgctaaccagaatcctttaagtactggtattctcccccaagtgctacagaccctactgaattcaatttcctctctccacaatcttaaaagcccatctccagcactgactttccgaatagtgaaaattataatagtgattttaaagacagcagctcccaaaactcaagggattaccacataccagactccatgtgctaagcccttagaagacctgtatccaaatcccaattttaccacgtcctaatcctgactctggacaagtagcttaacctttctgacctcacttccctcaactgcacaataagaatggtaaggccgggtacagtaactcacacctgtagtcccagcactttgggaggccgaagcaggaggatctctggagcccaggattttgaggccagcctgggcaatatagcgagaccctgtcactgttaaaaaaaaaaaaaaaaaaaaaaaaactgggcgtggtggctcacgcctgtaatcacagcactttgggaggctgaggcgggtggatcacctgaggtcaggagttcgagaccagcctggccaatatggtgaaaccccatctctactaaaaatacaaaaattagccaggcatggtggtgtatgcctgtaatccaagctactcagtaggctaaggtgggagaatcgcttcaacccggggcgggggggggagaggttgcagtgagccaagattacgccacttcactccagcctgggcaacagagcaagactcagtctcaaaaaaaaaaaaaaaaaaaggaaaggtggctgggcgcagtggctcatgcctgtaatcccaacgctttgggaggccaaggcagtggatcacaaggtcaggagtttgagaccagcctggccaacatggcgaaactccgcctctactaaaaatacaaaaaattagctgggcatggtggcaggcacctgtaatcccagctactcgggaggctgaggcaggagaatcacttgaacccaggaggcagaggttgcagtgagccgaaactgtaccactacactccagcctgggcaacagagtgagactccatctcaaaaaaaaaaaaaaaagtaagattaccaattcttggccagcaccttgggaggctgaggcaggtggataacctgaggtcaggaattcaagaccagcctggccaacatagtgaaacccctctctactaaaaatacaaaaattagccaggcgtggtggtgggcacctgtaatcctagctactcaggaggctgaggcaggagaattgcttaagcccgggaggcagaggttgcagtgatccaagatcgcaccactgcactccagcctgggcaacagagcgagaccttgtctcaaataaataaataaataaataaataaataaataaataaataaataataaaaataaaaaaacaccatcttaaaaaaaaaaaaagaggacccttttttttttttgagatgaagtcccactctgtcgcccaggctggagtgcagtggcgtgatctcgtctcactgcaacctctgcctcccaggttcaagcaattatcctgcctcagcctcccaagtagctgggattacaggcccccaccaccatgcccggctaattttctgtagttttagtagagacggggtttcaccgtgttagccaggatggtctctatctcctgacctcgtgatccgcccgtctcggcctcccaaagtgctaggattacaggcgtgagccaccacgcccagccaaggacccattcttaaaggtgttacaaggattaaacgagttaataaacagagtccttagaacaaagatgcacggcaggtggttaagtgcgatgttaagtgtgcatcaaataaaacaaatcttcagtaagctagggaaacagtgggacagtcactgacttaatgctagttttatacaaagtgtgagctgggaacaagtataaggacaacttaatgggggtccatgggatctgacaacagggaatcacacagtacaggttctgaacagtatccctattcaaagggaatacgtagtattccttttcaattatctttccatttcagtgtacaatgtaatgggctgttcagtttccattgtattttacctgaacttttccttcctctcatggccagcaatgctagttttccattgaagacagcaatgcgccgggcacggtggctcacacctgtaatcccagcactttgggaggcagaggcgggcagatcacctgaagtcagaagttcgagaccagcctgaccaacatgcagaaaccccgtctctactaaaatacaaaaaaaattagccgggcgtggtggcgcatgcctgtaatcccagctactcggaaggttgaggcaggagaatcccttgaacccaggaagcggaggttgcggtgagacgaaattgcaccattgcactccagcctgggcaacaagagcgaaactccgtctcaaagaaaaaaaaaagaagaagacagcaatgcaaatttgccttctcaaattaacttactggggaaaaaaatgcactagtcattatcaagaaaaagaaaaaaactagtacttcaggactcagcaaaattggtcaaatagtaagtgacaggatgtcgatttccccggctccaattctaagtttttcctattgctgtctctgagctttctcccccagcttccctggaattcccagctacaccaatgactctcagaatcattatcattatagtcccaatccacgagctctcactgtgccagcccctctgcttaaaatctttacacacacagatttcatcagaatcctcaagacgaccctatgatattgggactatctgctctcattgtacagatgagaaaaaacggggttcaaggaagcgaagacacaggccccactgccgcacagtggagcgggacttgaaccaaaattcgacggcttccaaacccaacaatttttcatactaagcgctcaaacatcaatactaataataatagtatagtaacgaagtgagcgttatgcggaggcgctgagctaaggcatccaacgtacacgacctgacttctcactcccatttataaagccggtgatacagtcggattctaacccccattccacaggggaggaaactgaggctcaaagaaacaaatcgtaagtccgaagccgtacaacggagcccgaactgagtccagacacccggacgccacccgtccctaccgcaaccggcccagtcccaccacccccggcccgcgcctcacctggcccaccgggcccgcgcccactcgcgccgcccgccctccctcccggcggcgccaactgtcagacactcctcccccggcccgggctgcccgccccggaagcatcctctcaccgccggaagctgaactgactcgtccgcggccgctctaccccaacaggccgccaccagcgagagtgcggccataaccatcacgtgaccgcccaccgacaccagcgagagtgcagtcgtaaccgtcacgtgaccgcccaccgtcggcccggcgctcccctccgcccgaagctagcaagcggcgcggccaatgagaaaggcgcatgcctggcccccgccggcctgcagtctagccgtagtgcgcctgcgcgcggctaggaggggccgtcaggcggggatacagcctggaaggtgcgtgtggggctgggtctcggagtgggagacgtggagtgcaggtactgtgcgatctgggggcgcggcgcctcggctaccctcctcgtgttgtcttccacgctataatgcatggaatataatatatattatatggaatataatatatggaatataatatatataattatagcgttgtcttccacgctataatttatgtcgtcctcggtctctttatgtcaccattcctctccttctgtctcatcccacttaaatcctcacaactccttctgtcgccatcaccctctttaaatcctcacaactcctcttgttgtcatcaacgcccttaactcgctttcgttccctgtaagccctctttgccaccataggtcgtaatcgctccctttaaattcgtcatcgccatatgttacctgcatcctgcttttgttgccatttctcctttataaaatcctcatttctctttaaaccctcatcatacccccaagtcaccttcgcatggctactgtccccatcgctcttcttaaatcgcgctaatgcaactcttacgtcatcattaccccttgtgtctttgtccctcccttggcatcactgttcctctgaccagtcaccatccactcctcatgcttccagttttccccataaggagccacccagccttacagttatttttcttccctccgtgtcttcgtcatttccccgtgtcacatctcacataacatacggggtactgcagcccattacctggggtgtgtcagaatcccagccccaccactacacctctggataccttgactgccttatggcacctttccaatcccagcttcatctgcaaaatgcacacggggacatccacatcagggctgagtgtgacgattctgtgagtttattcttgtggtaggctcagcttgacatggtgtttttggctaatattgttattaaccatgtcaccctcggccgggtgcggtggctcatgcctgtaatcccagcactttaggaggccaaggtgggcggatcacctgatgtcgggagttcgagaccagcctgatcaacatggagaaaccccgtctctactaaaaatacaaaattagccgggcgtggtggtgcatgcctataatcccagctactcgggaggctgaggcaggagaatggcttgaaccggggaggtggaggttgcagtgagccgagatcgcgccattgcactccagcctgggcaacaagagcgagactccgtctcaaaaaaaaataataataataggccaggcgcggtggctcacgcctgtaatcccagcactttgggaggccgaggcgggcggatcacctcaggtcggaagttcgagaccagcctgaccaacatggagaaaccccatctctattaaaaatacaaaattagccaggcatggtggcacatgcctgtaatcccagctactcgggaggctgagacaggagaatcgttcgaatctgagaggcggaggttgcagtgagcctagatcgtgccattgcactgtagcctgggcaacaagagcgagactccgtctcaaaaaaaaaaaaaaaaaaaaaaactgcatgatcttgggcaactaacttaacctcccagcgcctcagttactgcatctgcaatatgggaatgaaaacacaaattaatcattctgcacataattcttaagcatgtactatatatgtgcccaacactgctagacactggggatacctcaatgaacaatacagacaaaaatatctcggcctggcgcaatggctcacacctgtaatccaagcactttgggaggtgaagtgggtggatcacctgagaccaggagtttgagaccagcctggacaacatggtgaagccccatctctactaaaaatgcaaaaattagccaggcatggtggcgcgcccctaaaatctgagcaactcgggaggctgaggtgagaggattgcttgaacccaggaggcggaggctgcagtgagttgagatcgcaccactgcactccagcctgggtgacagagtgagaccccatctcaaaaaaaaaaaaaaaatctggccttatggactgtgtactacactctagtgggggtaagaggcaatgggtaaataggtaagtagattattggatgtattagaaggggcatggggaatgtggggtcaaggttatagttttaaatagggtggtcagggaaagctttctgagaaggtgacatttgaaacaaatacttgaaggagaagagagagtagggctgggcacggtggctcacgcctgtgatcacagcactttgggaggctgaggaaggtggatcgctggagctcaggagtttgagatcagcctgggcaacatagcgaaaccccatctctacaaaaattagccaggtatggtggtgtgcgcctgtggtcccagctacttgggaggctgagaggtggggggatcgcttgagcctgggagttcgaggctgcagtgagccatgattttgccaatacactccagcctgggcaacagacggagaccctgtctcaaaacaaaaaaacaaaacaaaacaaaaaaacggccaggcgtagtggctcatgcctataatcccagcactttgggaggccaaggctggcagatcacctgaggtcaggagttcgagaccagcctgactaacatggtgaaacctcgtctctactaaaattacaaaaaattaggcaggcatagtggcagacacctgtaatcccagctattcaggaggctgaggcaggagaatcgcttgaaccagggaggcggaggttgcagtgaactgagattgcgccattgcactccagcctgggcgacagcgagattctgtctcaaaaaaagagagagagaaagaaagagtgacatggccctctgggggaacagcatgctgggcaaagagaacagcaaaagcaaaagtcttgcggtaggagcaagcttggaatatttaaggaatagcaaggaggtcagtgagagaggagaggggcaagagacgacattggaggggtgatggggcacatcgtggaaggccttgtgagccatgcagaaggctggcttttactcccagtgaggtgggtgccacaggaggatgtggagccgaggagggatgcggtccagtgtgacatgaagccatcaccctgagctgtggcagctccagaacttctacccaggatcgactagtgagaggcagccttattggaaagagagccagaatcttcttcagtccgcactcacatatcctttatgttgggagaaagtttcaaatatccctgtcaaagatcgagaccgggcgtggtggttcacgcctataatcccagcactttgggaggctgaggcgggcggatcacttgaggtcaggagttcgaaaccaccctgaccaacatggtgaaacctcatctctaccaaaattatataaaattagctgggcgttgtggcttgtgcctgtaatcccagctactcaggaggctgaggcaggaaaatcgcttgaacccgggaggcagaggttgcagtgagccgagatcacaccacttcactccagcctgggcaacagagcaagactccatctcagataaataaataaatagtcataaaatttgagggcaggctagggaaatgctaacggaatttttgagaggccggcgccaccacggggttcagctgctgtcccagacggtggggggcaggcagcaggggatctacagatgatgaacaacaggagaggcagctgtcatgtggcatctgtccctggaagcttgaggcagcttgggttcaaatccttgctccatttcctctctctttttttttaaccaaagtccagttccaggcttaccacatatcctatttctctttatacctgtgacttcacctctctggatccttaattccctaagtgggatttttaagaggactgttgtgaaaattaaatatattaagtccaatttaaaaaaataaaacaaatatattaagtgctttgaggccaggcacagtggcttatgcctgtaatcccagcactttgagaggttgaggtaggcagatcacttgagcccagcagttcaatagcagcctgggcaatgtggtgagatcccaactctacaaaaaaataaaaaactagctgggcatggtggcacacacctgtggttccagctactcaggaggctgaggcgagaggatcacttgagcccaggagttccaggctgcagtgagatgtgttcccaccactgcattccagcctgggcaacaaagcgaggagaccctgtctcaaaaaaaatcaaaaatgaatgcaagaagccccattgtctcactccacaccctgcacttttgcaggctcacgcctccctcaagctgcagggtccctcgcctgatgtgatgaagggagattttgcattgttttgttcatgaattagttcaaccatgtactgccctggaatacaactgagctctgggttcaaattcctagctgatccctataatcccagcactttgggaggctgaggtgggcagatcactcgaggtcaggagttcgagaccagcctggccaatatggtgaaacactgtctttacaaaaaatacaaaaattagccaggtgtggtggcgggcacctgtcatcccacctactcaggaggttgagacatgagaatcacttgaacctggaagatggaggttgctttgagccgagatcctgccactgcactccagtcttggtgacagagtgagacaccatctcaaaaaacaaacaaatttccaactgacaaaccaatgctgtgcaacctaagcaggtaatttccctgagccctgccacctcatctgaaaaacagagatggtaacactgctttgccctaaacttaccatgttattatttttcttttcttttcttttcttttttttttatttgagatggagtcttgctctgtcacccaggctggagtgcagtggtgtgatctcagctcacttcaagctctgcctcccaggttcacaccatcctcctgcctcagcctcccgagtagctgggactacaggtacccgccaccacgcctggctaattttttgtatttttagtagagatggggtttcactgtgttaaccaggatggtctcaatctcctgacctcatgatccgcccgccttggcctcccaaagtgctgggattacaggcgtgagccaccacacctggccctaccatgttattatttttctttctttatttttttgagacagggtcttgctctctcacccaggctggagtgcagtggtgcagtcatggctaactgcagaccaagctcccaggctcaagccatcctcttgcttcagcctcccacgtagctagggctacaggcgcataccaccatccccagctattttttagccttttttttttttttttttttttgagacagagtctcgctctgttgcccaggctggagtgcagtggcgcgatctcggctcactgcaacttccaccttctggggtcaagcgattcccctgcctcagcctcctgagtagctaggattacaggtgcatgccaccaggcccggctaatttttgtatttttagtagagacggggtttcaccatgttggtcaggctggtctcaaactcctgacctcgtgatctgactgcctcggcctcccaaagtgctggggttacaggcgtgagccaccacgcctggcctaggctttttatttttctgtagagacaagatctcactttgttgcccaggctgcccaggtctcaaactcctgggcttaagtaatctccctgctttggcctcctaaagtgctggaatgacaggtgtgagtgagccactgtgcccagccatgttattattattattttatttttcattgagacactgtcttgtgtcacccaggctggtgtgcagtggtgcaagctcagttcactacaacctctgcctcccgggttccagtagttctcctgcctcagcctcccaagtacctggaattacaagtgcgtaccaccacgccctgctaatttttgtatttttaacagagacagggtttcgccatgtaggccaggctggtctcgagctcctgacctcaagtgatccacctgcctcagcctcccaaagtgctgggattacaggtgtgagccaccgtgcccggctgtgttatttttgtttttgtgttgttgttttgagactgagtctcactctgtcgcccaggctacagtgcagtggcatgatctcagctcactgcaacctccgcctcccaggttcaagcgattctcatgcctcagccccctcaagtagctgggactatagatgcacaccaccacgccctgctaatttttgtatttttagtacagatggggtttcaccatgttggccaggctggtctcgaactccttacctcaagtgatacacccacctcggcctcccaaagtgctgggattacaagcatgagccaccatgcccgaccctgttgttatttttgaactgggacataagcctttggcagttgtgatgccactgtctccctcccctgctttatttttttccaaggcacattccatgtatttcactcatttattttcactccctcactcccttagtagaataacatctttaagaagattttttttccttttttttttgttttttgttttttttgagacagagtttcgctcttgttgcccaggctgaagtgcagtggcgtgatctcagctcaccgcaacctctgcctcccaggttcaagtgattctcctgcctcaccctcccaagtagctgggactacaggcacgcgccaccagggcctggctgattttgtatttttagtagagacgggtttctccatgttggccaggctggtctcgaactgccaacctcagatgatccgcctgcctcagcctcccacagtgcttggattacaggtgtgagccaccgtgccggctcctttttttttttttttttttttttttcctgcaatctcagtttctggagcagggcttgtcagcaagtcattattgattaaatattagttgaattaatagattaattaactggccactgagcacctgctatgcactttcctatgctccatggtactggggacatggcagtgagttagatagcctggacctgccgtcataggtctcccagtcaaataggagagacgaacccatcattaggcactgccagcagcaagcactgccagctaatcacagcactgattttgagcaggagtgggacagcttagatttctctagttccaatttagaagtgttcaccattcatgatgctttcttggacctatttaattgtttttcagactgaccgtcttctctccctaggaggcataggcagagggatcagggctgggaaagggaggcccaggggactgtgtgagcccagagggcttcatggaggaggtggtatgtgagcggacagaaatgagcaaggtgtgctcggcagggaaagcagctgtgggagggtctggtgatgaaagtgtggttttggttcaaggaactgaaagatcataaatatggctggggtgggaagaacggtgagagagtaggccaaagaggtcattcagggaagatcattcaaggccctgtcagccacagtgaggagctgagactgtgtactgaggacaccggggagccacagagtttttgagcaggagagggatgtgtcaaattcacgtggaggtcggattgcaaggattgagtggagtctggaagccaagggaggtggctggagtggggacccaggtgggagagactaagtcagagcttgtgggggagggcgaattggagagaccctcacaggaccaagtcgacaaatggttggggtccaggacaaggcccagggctgggggtagtcaaggagagctttctggaggaggaggcaccaaggctgagacctgaaggatgggttcaacagctcttcttgaaatggggacctggggcaggaagatggtaaggacagttggggacatagtaggtgtgggagtctggggacaccttgaaggaggtatctggggggccctggaacctctagagctggagtcaggggaaaggaggaaacaagacagagctttgggttgagaaagagggaattgaagctgtaatgatgggggaaggtccacaggggcctgtccatgtagggctctgtaggacatggtaagaagtttgtcctttgtcctgggggcaatggggagccacagaaggattttgagcaggagtgagacagcttagggtttttaagttccagttcagaagtgtttatcattcatgatgctttttggacctatttaattgtttttcagactgactgacttctctccctaggaggggcacttattttaaagggtccgttgaaataaaagatctaactgctgaaaatgaaaaatcagtttgcaaaaccagtgttctgttccgttttctgtagacaattgatggttcagtccaaagaggtcagaaacaattgatggtttagtccaaagaggtctgtaccatctagtgaaaatcagcaccattaaacatgagaacatttctgttttaaaccatttggaagccccgtgaattttattttattttgttatttttaaaattagagacaggggtctcgctctgttgcccaggctagtctcgaactgctgggctcaagcgatcctcccacttcagcctaccaaagtgctggaattacagatgtgagctactgctcctggccagcctgtggatttgtaaatgtctcctgtggtgtgatctgcctcatgtttcctgtatgtaggcttcagaagcacactctgcattctcagatggcttgaatcagccttgactttttccccaccctctcagcctgaatctcaggttgagatgccattatctgcacccaccctatatgctctgggcttagaactgataccagctggttatcattgtgtataaaagtgtcactaggtatagagagacatctaaaataatctcctctcaaaattttctattctgctgctccatttcttctgctttcagtattttttgagcaattacaatggtctgggccctagagctagaggaataaatcagacacggacatagcaagggacacatatgttgattatgtgtgattaaaatgtatacaagatacgagggcgtacacagatctcaccaactagcatgtttcaagggcttactgtgcttcctgccttccatggatgatctcattgacttcccaacaaatgtgaggttggtattattaatctccacattgttcaaagaatgaaagtgtggcttagagaagggaacctcttttcccagttccacagagctgagatctgaagtctgagctgtgggactctgagacccacccccttaaccattcagagatcccccagccaccaccctccagtgcatataagatgatacccatttcatttgttgttttgagaccgtgtcttgctctgtcgcccaggctggagtgcagtggcacaatcacggctcactgcagccttgacctcctggactcaagcagtggtcccacctcagcctcccaagtggctgggaccacaggcgtaggcatgggctaccacacctagccaattatctttttgtttgtttgtttttgagatggagtttcgctcttgttgcccagactggcatgcaatgatgcaatctcggctcactgcaacctctgcctcccaggttcaagcgattcttggacctcagcctcccgagtagcctgccaccatgccaggctaatttttgtatttttggtagagacgaggtttcaccatgttggccaggctggtctcgaactcctgacctcaggtgatccacccatcttggcctcccaaagtgctgggattacaggcatgagccaccgtgcccagccgcctagccaattttttaagtttttgtagagatggggtcacaccttgttgccccaactggtctcaaactcctgagctcaagccatcctcccgccttggcctcccaaagtgctgggattataggcataagccactgcgccctgccaatatggctaatactggtttatagatgaggccagcagggctcagaagtaaagccccatgctcagcatcactcagcaagaaagtggcagaggtgtgatctgaaccatgagctctccaatttaaagggctgctgtagaggaggaatcaaatctcccactgccaccctcccctgggggtggggtgttcagggatctgtgacccagtgggttttacttcctcctttttgcgggctatggtgtcatactccaaggggggcaggaccacaaggcaaggggactagggggtattctgtgggctgggagagagcacgcttcctggcagtgccctctcccagatgagacctgatctcttttttgttttttgttttttgttttgagacagagttttgctcttcttgcccaggctggagtacaatggcgcaatcttggctcactgcaacctccgcctcccaggttcaagcgattctcctgcctcagcctcctgagtagctgggattacaggcatgcgccaccacgcccggctaattttgtatttttagtagagacggggtttcaccatgttggtcaggctggtcttgaactcccgacctcaggtgatttgcccacctcagcctcccaaagtgctggattacaggtgtgagccactgcgcccgaccgagacctgatttcatctcatgtcataccagcaaggaggcagagcataagtaccaacctggatggggcgcgctgggagccccatggaggttctagggtcctgagaatacaggcattgagacgggctgaggaggaactccagcatccggctgcccgtgcccaccttcagtttcaccctaccctgctcccacaaggatctgagcagggagggggcctgatttccttctcccgctgagaccacagtcctctggaggctaggatctggtgatggggcaccctagctaggagcctgagcctctttataatttagtttccatagaagttatatgtgcatttaaaaaaattcaatgtaagtaaagacctacaatgaaaagcaaccgtcttgtctctgggggtgggatgggggatgcctttgcgtggggagctgttaggagacttgacagtcacctttgctgagagcctcctgcatgtcaggggctcttctatgcacattatatgtgtgctaattccttttttaaaactttactttttgtggagatgagtcctgctgtgttgtgtaggctggtcttgaactcctggcctcacgcaatccacccccaaccttagcctcccggagtgcagggattacaggtgtgagccacctttcccagcctgttgactcctttaattcagaggagtcagtcagattttagacatctcaaatgttgtatgttcaaaaccaaactcctggtcttttccccaaacttgtgtctccctgtcttgcccaatcagctgttgacacctccaatccttgcagttgctgcggccaaaactcagtcatccctcactcctttactgctctcaaacccacatccagcctagaaatgccatcccctccaccttcaaaatgcatccagaccccgccctttcttcgacacttggctgaccacaccctggtcctgtccacccttggctcctgtctggatgctcccagcagcctcctccctgggctcccttgccctgccccagtctgttccccacgcacagccgccaggggatcctgtaacacctgtgtttgtttcttcgggctgctgtaacaaattgccaccaagttggtggcttaacacaacagaatgtatggccaggcgcagtggctcctgcctgtaatcccagcactttgggaggccgagacagtcgatcatttgaagttgcaccactgcactccagcctggataacagagcgagactccgtcttaaaaaaaaaaaaaaaaaaaaaagacaacaaattcattctctcagttttggagccgaagtccaaactcaaggtgtagcagggccatgcgcctccagaagctggaggggagattccattcctcacctctcccagcttctagtggctccaggcattgctgggtttatggccacatcaccctaatgtcagcctccctgttcacatgaccttctgcctgttctatctctgaggacagttgtgattggatttagggcccatccagttagtccaggatgatctcatctcaagatcctaaatctgattacaattgcaaagatcctttttccaaataaggtcacatgcacgtaagttccggggattatgcttgcgtgggacacatcttttttgaggccaccattcaacccactacaaaatccaactgaagcccagcgaagtggctcatgcctgaaatccccgcactgtgcgaggccaaggcaggagggtcacctgaggccaggagttcaagagtagcctgggcagcgtagggagatcctcatctcttttttttttcgagatggagtttcgttcttgttactcaggctggagtgcaatggcgcaatcttggctcactataacttcctcctcctgggttcaagcgattctcctgcctcagcaatcccgagtagctgggattacaggcatgtgccaccatgcccagctaattttttatttttagtagagacagggtttctccatgttggtcaggctggtctcgaactcccaacctcaggtgatccgcccaccttggcctcccaaagtgctgggattacaggcatgagccatcacgcccagtggagatccccatctcttaaaaaaatctgaagcagatcacatcatccttccctgctgggaacccacacgtgaccctgttctactcatcacagtccaggcagccctgcaggatctggccctatcacctctgtgacatctcctctcccactccccccagcccacttcactgcagacacactggcatcctcactcttctccatccacaccaggcacattcctccctcagggcctttgtactgatcatttttcccacagatgtccatctcaccccaccttgaagtttttcttcaggtatccccttctcagtgaggccttttctgacctccttattaaatatcacaaacaattccacccccacccccttccctgatcctctatggcacttactaccttctaacattatatcatttatttattatcttgtttattatcaccttttttttttattttttgagacggagtttcctttgtcgcccacgctggagtgcggtggcgccaactcactgcaacctccacctccctggttcaagcaattcgcccacctcagcctcctgagtagctgagattacaggcgccctccaacacgcccggctaatttttgtatttttagtagagatgggatttcgccatgttggccaggctggtctcgaatgccagacctcaggtgatccacccacatcggccccccaaagtgctggcattacaggcgtgagacaccgcgcctggcctctgtttttccctcgtgtctattttgttcacagctgtatccccagtgcctaaaacaatacctgatgcacacaaggcaaccagtaaatgtgtgtaaaattaacgaacagcaaatgctattgttaccatgcccattttgcagatggagaaaccaagagcacagaggtgttgtcacttctccaaggtcaaacagtcactaagtgcagaagctcagattcaaacacaggtatctggctctagcacttactgtattgtcttgccagtctcatccaatcgaaatcacttctccagtactagtttttatttgtttgttttttatgagacaggctctcactctgtcagctgggctggagtgaggtggtgcgatcactgctcactgcagtctccacctcccagattcaagcaattctcctgcctcagccttccacatagttggaactacacgtccacaccatcataccaggctaattttctttcatttgttgtagagattaggtctcactatgttgcccaggctggtctcaaactcctgggctcaagcaatcctcccaccttggcctcccaaagtgctgggattacacgtgtaaaccaccgtgcctggccctccaatattagtttactttttaatcaaaagttaacacaataagaaaaataatacaattaaaacatcaaaagttaaaattaaactaatcattacagacctgtaatcactgtacaatttggaagccaaaacatcactgacaatttgaacgaagtccatctattttcttcctatttttattttgtttttgtttttattttttatgttcttgtagagactgggccttgctatgttgccaaggctagtctggaactcctgggctcaagcagtcctctcacctcagcctcccaaagtgctgagattacaggtgtgagccacggtgccaggcctttctccttatttttggtttattagtgaccatcccagttctccagccctgacgctgccagccctgttacttcagatctccatgccccaccttgccttcggttttgtttttcttcatcttggcttccctaatttcacattgcctgctgttccaactccatattcttcaataaaaatatgtctcaccaaggccttcaaagaaaattgaagacaagcatttcctgcactccctcctgcctcctccacccacaatgttgtggtcaaccgcctctaagactgatgttatcttctgcttctcctagtgacctctggagtttcaaataaccttagtctgttgctgtttcttgctagatttgtttgtttgtttgtttgtttgtttgtttgagacggagtctcgctctgttttaacccaggctggagtgcagtggcgcaatctcagctcactgcaacctctgcctcccaggttcaagcaattctcctgcctcagtctcccgagtagctgggattacaagcgcccgccaccacgcccagctaatttttacatttttggtagagagagggtttcaccacattggccaggctggtcttgaactcctaacctcaggtgatccacccacctcggcctcccaaagtgctgggattacaggcgtgagccaccacacccgacctgctagatcctttttaggcatccccatttgtcttcctgccatgaaaagaggggatctagcatgttctaccctcgccagtctgggatctgacattggtagggaggagtttgcaagttatccctacaaatctaggttggatcttggagtaaggggagcacctagctctgagagttttctttttcttctttttcaaaaaagagtaatgcgcgcccctgattttttaaaaggtaatgaaactggtgacgcctgtgtttgctttataattatttctcaacctacaccgagatattttctatacttctctgaaaatagcttatgtttcacaattttaaaaaagaaaataggctgggcacagtggctcatgcctgtaatcccagcactttgggaggccaaggcaggcggatcacgaggtcaggagttcgagaccagcctggccaacttggtgaaaccctgtctctactaaaaatacaaaaattagctggtcgtggtggcaggcgcctgtaatcccagctactcgggaggctgaggcaggagaatcgcttgaaaccacaaggcggaggttgcagtgaaccaagattgtgccactgcactccagcctgggcaaaagagcgaaactccgtctcagaaaaaagaaaataggggccagatgtggtggctcatgcctgtaatctcagaactttgggaggccaaggtaggaggatcacttgagtccaggagttcagcctgggcaataagcaagaccccgtctatacaaaattaaaaaaaaaaaaattagctgcggctgggcgcggtggctcatgcctgtaatcccagcacttttgggggcctagacgggcggatcacgaggtcaggagatcgagaccatcctggctaacatggtgaaaccccatctctactaaaaaatacaaaaaaaaaattagccgggcatggtggcgggcgcctgtagtcccagctactcgggaagctgaggtgggcgaattgctcgaaccagggaggtggaggttgcagtgagccgagatggcgccactgcactccagcgtgggagagacagagcgagactgcgtctccaaaaaaaaaaaaaaaagcagctgggcatggtggcacgtgcctgtagtcccagctgcttgggaggctgaggcaggaggattgcttgagcctgggaagttgaggccgcagtgagctatgatcatgctgctgcactccagcctagggaacagaactctggcactaaaaaaagaaaagaaaagaaaagaaaataggcttacaataaaaagcaatcttgacctaccccaaaatcccactcccttgaagacaaccacttctgccctgttgcttctctcagtaatactccttttctgcagttatctcttgacttcctgccatgtgtgtttgggggagcttgagggaagagggtgtccctgtctcattgagagaggtgccaccctgccgtgaaaagaggtgccaccctctgtcaattaggagaggagggatgagagaggaaaggggtctccagtgtatttctccagccggggccttaaatccctcttgggagatatgggatggggtggatcggaaaataaatttttttaaatccctaccaaaatatcagctggctttttttaaaaaatcaaataccaaaatctaaatagactccaacagaaaattcaccatctcctctgaccttttcttcccatctcatgctgtgaactgtcttctgttgactttatcgctacctttcttcattctgttattcaaccatgatctctccgtttcattttataagcgttttattaatttcatttatgtatttatttttgactaggtaatgcatgtccatggtacacaaattcacaaggtttgtaaatgagaaaagacgtgaggttccttttgttctttacctgtggcctccctgccctacacggggactctagggtggaatgtagcaaagcccatccaccagccatgtactaccccccaacccggccaggctggagcgaccgtgtctggggagccgagccccgcttctcgctgcggtgagcccggactggggcacgcactgcgcagactccccgctgcagtgggcggagctcccacaggccccgccccctcctcccaccctcgttcagcctgtccagacagaagctggggcccaccggaggtagctgcagacgcctgagagcgaggccgaggcccctcaggggtaggtggggggaggctggctggggggatgggcagcggggtggcagggaggccccgatgatccctggctgagctgtgtggtgtgggggcacctgagggcggaggagccacctagaatataccccctgtcccagggctgagaaaagccaggcacaaagacctggggctccgctgacctcatccagcgctgcctttcttggggtgtctacaggttggaggagggagaagggggctgctagaggggagctgcgtgggtgctgatgggggcagggtgggcactgcagagtgaagagcaggcagcagagcgttggattttgagggatttcgaaatcctgctgaccagtgaccagcttcctctttttggggtggtgggcagtgtgccagtggcccccatgattatgaatagccccaagactaatcactcttctgtgatgtctgtccctggaaagcgtagaacaccccacacagtgcccacttttgttctgccagtttggagaccctgacacacccaccttctcacctgggctctgcgtatcccccagccttgagggaagatgaagcctaaactgatgtaccaggaggtaggtggattggggggctcagcagggtggaactgggtacagtgggggtgggggttcccaagagccacctgtcacccccgttgttgtccccatccccagctgaaggtgcctgcagaggagcccgccaatgagctgcccatgaatgagattgaggcgtggaaggctgcggaaaaggtaggagccctccgccaccctcgctctgtctcagagacaggctgggctgcccccctcgggctggctgaccacctcctcctccccacagaaagcccgctgggtcctgctggtcctcattctggcggttgtgggcttcggagccctgatgactcagctgtttctatgggaatacggcgacttgcatctctttgggcccaaccagcgcccagccccctgctatgacccttgcgagtaagtggggggtgctgcagttggtgggggaggggcctgccagaccaggtacacttaagcacacactaaacagggcctgcactcagccctacccagcgcttgcgacaagtgaggaggttgcaggctcccaagtgctcgcccgccccctcctcctccacacacatagtttctatggcagccacagcgtcatcttctgtcaggcctgtgaacagacacagcatcttccacccacatctgtggacccacacacacatctcaatacacgaccttccttccacacctctagacagacacgcagaggatcatgagtccaggcacgcattcaaatacacacagttttaaaaaattttttttaaaagaaaagaaaaactcaaatacagtttagctgggcttggtggctcacgcctgtaattgcaacactttgcggggctgaggcgggaggattgcttgagcccaggagttccagaccagcctgggcaatgtagtgcggctccatctctactaaaagtaaaaaaagtaaccaggcatactggtgcacacctgtagtcccagctactcaagaggttgaggcgggaggatcgcttgagcccaggggttcgaggctgcagtgagctgagatggcgccactgcgcttccagcctgggggacagggcaagactctgtctctaaaaaaaaaaaaatacagtctatccaacacacccatggacggacagctgagcactcacctcccagcccttgctctccggcaccgtatggctgatagcatcccccaccccccagagcagtgctggtggaaagcattcctgagggcctggacttccccaatgcctccacggggaacccttccaccagccaggcctggctgggcctgctcgccggtgcgcacagcagcctggacatcgcctccttctactggaccctcaccaacaatgacacccacacgcaggagccctctgcccagcaggtacctgcaaccttggccctggccggcagcaggggcagggggtgggaggcagcgggggctgtggggaatgaaggggtttctcctgcagcccaggagacagaggggtgtgtctcacacagcagattggacacaggtgtttgcaagcagctgtcgtcacgtggctctctggactgggggcgtttgtcacggtcatctgtaggcctctgaatgtcagggtgcgggtttggttacaagggattattaggctggcagatgtcactcacccacaagctgtcctgacccagtcacacaaagaaagggaagagtggagtaattaacagcccagcctcaagacaggggccacctcccagctgtgtgaccccaggcaggccacctcttctctccagcttcagtttctttatctgtaaaatggggccaatttatagcacctgcttcttagggctcttgtgaggatgaaatggactaatccatgcaaattttagcacagtgcctggcacagagtcagcctttgtgagtctgctgttactatatatcctggtatggtctgcagacaaacttaaagaacataaaagcttcacaatttgaaaaggaacagcctacatggataacctcttccattgaaaaaccatgaatttgttccttctgttttcttctccctactggctctttttgtgagaagttgtcttaaaacttaactaaaattacaaggctccttaagaactgcctgaaaaaaataattatggccaagtgtggtgattcacacctgtaatcccagcactttgggaggcctagacaggaggatcactggagcccaagagttcgagactagcctgagcaacatagtgagacccgccccccacctcccctcaaccatctctactaaaaataaaaaaaaattaggagggtgttgtggtgcatgcctgcagtctcagatactcaggagatggaaggaggaggatggcttgagcccaggagttggaggctgcagcgagccgtgatcatgccactacactccagcccaggcaacatagcaagaccctgtctcaaaaaaaagaaaaagaaaaagtaataataataattacaaaagttaaaaaccaaagccaggcatagtggtacacacctgtggtcccagctacttgggaggctgaagcaggagaatgacttgagcctaggaattggaggctgcagtgagctgtgatcatgccactgcactctagcctgggcaacatagtgaaaccctgtctctaaaaaaaaatttttttatgttaaaaaaccgtatgagctcccactccctgctggctccctctaaagtggtttaaaacacagatgtaggaggcagatggtctgggttcaaatcctgctccatagctggatgtggtggtgcactcctgaggtactagctacttgggagactgaggcaggcggaatgcttgagcccagggattgaagatcagcctgggcaacatagcaagtccctgtctcaacaaacaaacaaacaaaaaaacaaaaacaaaatcccactccactactgagttctctgtggggattataattaaaccagcctcactgggttgtgagaattcagtgagttcgctgagaagaggcctagaacagggcctggcacacagtaggttccagggcatccttgactgttgctgttgttggcatcatcgtgcctcacccgataccttccaggaccccctgcctgagcctcgcccccaccatactgggagatgcctggaggccctgccttgatgctgaattttgagaaagtccctggaggggcaggaggggtcaggaggacttggagggggatcacagggcaactaattattaaagcagataaagatgtttaaaacagataaggaagtcttttaatattttaatctgtaaagtctttaatctatgcaggctaatgtaaagtctgtttactcctaatcatgtctcaaaataactccaccgggcattaccttgtggggttggagagctggctggtccagcccctcagaagctctcccctccccgcagggtgaggaggtcctccggcagctgcagaccctggcaccaaagggcgtgaacgtccgcatcgctgtgagcaagcccagcgggccccagccacaggcggacctgcaggctctgctgcagagcggtgagctggggcccaactggggctggtctgggcctgggggtacccagcctggcccctgatctctgcccctgctggtcacaggtgcccaggtccgcatggtggacatgcagaagctgacccatggcgtcctgcataccaagttctgggtggtggaccagacccacttctacctgggcagtgccaacatggactggcgttcactgacccaggtctgtctgcaccctgtctaccttccttccaggccactccctgccccacagggcacccagcctccgactgcatccctcactcaatccagagtcctctccacccattctctgtaatggcttccttcttgcctcctaccaggcctccctaatccaagccatgcacggtggctcacacctataatctcaacactttgggaggccaaggtgggaggattgcttgagcccaggagttggagaccagcctgggcaacatagtgagaccccatctctaccaaaaaaaaaaaaataagcccggtgtggtggcacacacctctggtcccagctccttgggagactgaggtgggaggatcacttgagcccaggagtttgaggctacagtgggttgtattcatgccactgcactccagcctgagtgacagagtgagaccctgttacaaaacaaagaatccctaaatggagccctctactgccctccccctgctcctggaagcctggggctccctctgatccccaattgcagctaccagcccctctacatggcattcaagaacctgcgcacccatttgatcttcattgtacatctctgtgtgcctgctctaagtccagccctatcctgggtaatgttgggaacatggtggtaacagatggacctcatggaactcccagcccaatgcagactggcctgtcacctgacagtgacagcccagaggggtcagggccggggttggggagacacaggcagagggtcagggccaggatggagggaacagagggctgtggaagctcagagaccccaacctggggcattggagggtttcccaaaggaggtataactaatctgatccctgaaggatagggaggaattagcgcaagatggaacaggaaacagcttgggcaatgaggtgaagataagacaggacaataactcatgaattcatttcctcaacagatagttcccctaacctttaatctcagcaattatgcagggagatgctgtagatatagctgtgactgagacatccctagtgcctgtcctcccagcccaatgggaagaccagtttgtcaccagaaagaatgaggagggaatcccaagggactgtgagagcccagaggaatgcctggtgcaggctgggtagtcatgggaggcttcctgaaggaggcaacatgtcagcctagacctaagaatgagtagaagctagctcagtggagggtagaagcaacagcagattgcaaacgttcaggaaacctggagctttggaataactgattttcatcaaaacttaagttgataatcattctaggactttagctattggagctggggtggagggggtactgtgggacagggggaaagacagagaccagactggggagtgtccctgtcatctgtgagcactaggccgctatcgctgagctcagcactgccctcctacaggtcaaggagctgggcgtggtcatgtacaactgcagctgcctggctcgagacctgaccaagatctttgaggcctactggttcctgggccaggcaggcagctccatcccatcaacttggccccggttctatgacacccgctacaaccaagagacaccaatggagatctgcctcaatggaacccctgctctggcctacctggcggtgagtctggggcaagtggggcctgtcatgtcccagccccatgccgtcactcacagcctccatctgtccctgtttggtgatgacagggagggcgtatcctgaccatcagttctcaccccagctcattctgcttggtcaggggcctggagtagttcccaacatccctcggcctctatttcagttagaaaatgggtattgtttccaacctgttagggctgctgggagaggtaccctgggttcatgcacaccaaacctttggtgctctatatcatccagtatagccacaggtggctctttcagtttaagttaattaaatgcaattaacaattcaggccaagtggggtggcttatgcctgtaatcccaatactttgggaggttgaggtgacaggatcacttgaggccaggagtttgagaccagcctggacaacatagcaagactccatctttacaaacaaacaaacaaacaaacaaaactagctgggttgggttgtgcatgcatgtagtcacagctacgcaggaggctgaggcagggggatcacttgagcccaggaaatctaggctgcagtgagccatgatcacaccactgtactccagcctgggtgacagcctgtttcaaaaaaaaattgtttcaagccaggcatggtttctcatccctgtaatcccagcactttgggaggccaaggccaagatgggaggatcacttgaggccaggagttcatgaccagcctgggcaacatagggagacatcatttctttctattttttttttttttttggtcttattatttattgttctagataggatacccaagaactagggagacaccatttctacaaaaacataatattaattaaaattagccgggtgtggttgtgtgcacctgtagtccctggggaggctaagacagggggatcacttgagcccaggagtttgaggctgcgtgagctgattgtaccactgcactccagcctgggcaagaggctgttgccctgtctccaaaaaaagaaaaaattcagttcctcatgcagtagccacatttcatatgctcagtagcacctgtagcaagtgaccaccatattggacatttccatcactgtgacaggctctgttggacaacactggctctcgccatggcagatactgatcactctggacaaggcactgatgtttctagctcttgatagtttcactagttgaggcaggcaacccaggtctccctaggtccccctgagcaagttacctgtccaagcccagagtcatcgtggaaggcacaaccctaaggcgtggacgtagggaagtgtgactcattggggtctttcactacaagggcctcccgcaggggatcaaggctctcctcattaccacttccccttttagagcctcagtttccttgtctcttgagcattaaggaagatggggggccaggcacagtggctcatgcctgtaatcctagcattttgggagtccaggatgggcggatcacttgagctcaggggttggagaccagcctgggaaacgtgatgaaaccccatctctaccaaaaatacaaaaattagcctggaggggtggcgggcacctgtaatcccagctactcgggaggctgaggcaggagaatcacttgaacccaggaggtagaggttgcagggagccgagattgcaccattgccctccaggctgggtgacagagtgagactccacttcaaaaaaaaaaaaagggggggaagcgggggagcgggggaactgggaagagggcctggtgaggcactgggcacccgaggggttcccagtcaaggcaggctgtgagcaaatcagggaagaaagtgactcgaggctgggcacagtggctcacgcctgtaatcccagcactttgggaggcctaggcaggtggattgcctgaggtcaggagttcgagacctgcctggccaacatggtgaaatcccatctccactaaaaatacaaaaaaattagctggctatggtgatgtacgcctgtagtcccagctacttgggaggctgaggcaggagaatcgcttgaacccaagaggcagcagaggttgcaatgagctgagatcatgccactgcactccagcctaggagacagagcaagactccatctcaaaaaaaaaaaaaaaaaaaaagacttgagcagaggtcctcaaactgagcatgccccagaatcagctgggcgggcttgttaaaacccagattcctggaccccaccccagcactctgattcagtaggccatgtgcagtgaggcccaggaatttgcatttctaacaagttcccaggtgatgctgttgccgctggatcagggaccttacgttgagaagcactgggttagagcataaattctggaaccagacagcctgggttcgaatcctggctccatttatctgctgtgtgactttaagtaagtcacttaccctctctgagcctcagtttcctcacatgtgaaatggatgtggtgattgaccctcttcttcatggaggctgaggatttggtgagatccacagtacctggcttgtggtgagctgtccgtatgtggggtccgttgtgacgatgaccctggcagggcacatgtcttaactgtcccctcgccctcagagtgcgcccccacccctgtgtccaagtggccgcactccagacctgaaggctctactcaacgtggtggacaatgcccggagtttcatctacgtcgctgtcatgaactacctgcccactctggagttctcccaccctcacaggtactgctgggtgtggagatagggagccgctgcagttggccaggagacgggagagggaatcatggagaccagaaagctggtgggggctccaggcaaggggacagatggaagagaagctgcagggagagacagtcaccaggaggtgaccggaagaaggtatctaggcacttgagacaggagaaagagagattacagaggagacagggatgaggtttcaggacaaggtttgagggaacagagaaaaggatgagagggccgggcgtggtggctcacgcctgtaatcccaacattttgcggggctgaggtgggtggatcacttgaggtcaggagttcaagaccagcctggctaacatggtgaaatcccatctctcctaaaaatacaaaaattagccgggcgtggtggcacgtgcttgtaatcccagctacttgagaggctgaggcaggagaattgcttgaacctgggaggtgaaggttgcagtgagttgagatcgcgccactgctctccagcctgtgcgacagacagagcaagactctgtctcaaaaaaacaacaaaaaaaaagagaaggctcagaatattggggttgagggcaggaagcctgaggcaggggtgcaggatgtgggatttggggaggtaggaggcatgggctggaaacaggatgaggggcttgggggatggggactaaaagtatttgggtttagggtagcaagcttggggatttgtgatcctgggataagaaggataacaaccggccggacgtggtggctcacacctgtaatcccagcactttgggaggctgaggcgggtggatcacgaggtcaggagatcgagaccatcctggccaacatggtgaagccccgtctctactaaaaatacaaaaaattagccaggtgtggtggcaggcgcctgtagtcccagctacttgggaggctgaggcaggagaatcgcttgaacccgggagtcggaggttgcagtgagccaagatcatgccactgcactccagcctgggcgacggagcgagacaccttctcaaaaaaaaaaaaaagaaaagaaaaaaaaaaagaaggataacaaccatacccactgcaacatccaggtggatgatggcacttgtggggctcaaagaaggtattctaggggcagtagataagacagtgggtccaggcatggtggctcacgcctgtaatcccaacactttgggaggccgaggcggaaggatccctaggagtttgagaccagcctgggcaacataatgagaccccgtctctatagaaaaattggaagattagcccagtgcggtggcactcacctgcagtcccagctactcaggagactgaggcaggaggatcacttgagcccaggagttggaggctgcattgagctatggtcgtgccactacactccagcctgggtgatagagcaagaacctgtctcaaaaagaaaaaaaagaggatggaccgggcacagtggctcacgcctgtaatcccagcactttgggaggccaaggcgggcagatcacctgaggtcgggagttcgagaccagcctgacaaacatggagaaaccccgtctctactaaaaatacaaaattagccaggcgtggtagcgcatgcctgtaatcctagctacccgggaggctgaggcaggagaatcgcttgaacccaggaggcagaggttgcagtgagccgagattgtgccattgcactccagcgtgggcaacaagagcgaaattccacctcaaaaaaaaaaagaaagaataaaagaggatgacaacactgggttttggggagcaggaatgggagccacagccaggaagaggaaatagggatgtgggatttatggagacaggaacagggtctgggagccagcgatgaggaagtcctctcaatagctaaagcagggcccaggcttggttccccaaagctgagggcaaagcctgtggacacagccgccctctgcatcctgccccacctcctatacacccgtcctcaggttctggcctgccattgacgatgggctgcggcgggccacctacgagcgtggcgtcaaggtgcgcctgctcatcagctgctggggacactcggagccatccatgcgggccttcctgctctctctggctgccctgcgtgacaaccatacccactctgacatccaggtggtaagtactgccccaagccaccccttggcccctgtgtggggcagtcctagggacacagccctcatgggactcgtctgtcaatgacaagggcagcccagagtgagccctgtcactgtggggaaaccatgggtcagggccagggtcatggggcacagggagaggggccaggaccgggatgagggggcacaggcagaggggttgggaccgggatgggggtgcagagagaggtgttgggaccaggaatggggacatgggcaggtagaggggtcagggctgggattgggagcacaggcagaggggtcagggctgggatggggaggcacaggcagaagggtcggggccgggttggagggcacagagagaggggttagggccagggttgggggcacaggcagaggggtcggggccaggatggaggaggcccaggcagaggggtgagggctggggtggggggcacagagagagggtttgggaccaggactgggggagtgggcaggtagaggggtcggggctggggttgggggcacaggcagaggggtcagggctgggatggaggaggtacaggcagaggggtcagggctgggatgggggggcacaggcagaggggtcagggctgggatggaggaggcccaggcagaggggtcagggccagggtcggggggcacaggcagaggggtcagggctggggtggggatgcccagaggaagcctctgccctagcgggaagggccaaggaagatgttctggaaatgggggcatctgagatgagacctcaggaatgaacaggagccattctgccgggaacagtgttttgcaaatgagaccaccggggcctccctttcagctttcgttctcagagggcccctccacctggccctgttctggcccccgaggattctgtgggaagcagtggagtcccacagatctcgctccacactctgctccctgatcccggggctcctccgactccccctgcctctcacactccttcccatcctcccctcccactcagaaactctttgtggtccccgcggatgaggcccaggctcgaatcccatatgcccgtgtcaaccacaacaagtacatggtgactgaacgcgccacctacatcggtgagtgtcttgagcaccacggggcgctgaagaagagggggttcagacaccaggggcggccccccgagggtgcccttatgctccacccattcctctctaggaacctccaactggtctggcaactacttcacggagacggcgggcacctcgctgctggtgacgcagaatgggaggggcggcctgcggagccagctggaggccattttcctgagggactgggactccccttacagccatgaccttgacacctcagctgacagcgtgggcaacgcctgccgcctgctctgaggcccgatccagtgggcaggccaaggcctgctgggcccccgcggacccaggtgctctgggtcacggtccctgtccccgcgcccccgcttctgtctgccccattgtggctcctcaggctctctcccctgctctcccacctctacctccacccccaccggcctgacgctgtggccccgggacccagcagagctgggggagggatcagcccccaaagaaatgggggtgcatgctgggcctggccccctggcccacccccactttccagggcaaaaagggcccagggttataataagtaaataacttgtctgtacagcctgtgcctgactgagtggtgtgagatggggtgcaggggtaggggacagctggcatgggcctctggtggggacatctttttgtgctgagccctcaacatgtcactggcatgtgctgagccctcagtgtgtgaccagtgtgggttagcatgtactgagccctcagcatgtgctggcatgggttggcatgtgctgagcccttaacatgtagtgtacatgggctgacctgtgctgagcatgcagcgtgccaccctgtggcccggcatggacttagcactcatgtagccagcatgggtatgtgctgcagagaagcatgttcccagattgatcagcagggaccaaaccattgccacatcccaagggtgaacaagcatggctgagcaccagagtgtgcaccaagtgtgaatttaggcctgccaagtggatttacacccagcacgtcccaaatgtgggtgagtgcatgccaaccctgtaaacatgtaggaaggacaggtcaacagacaaggagaccccagcatccggcaaacttgattaacacatactgaacacagcatgttctgagggtggattcccaacacgccaagcacatagcgtatttaggacaagggttagtcaaccaagcacagcttttccctcctagtgtgacagcagcccaggctcccgcctaagccagtggtcaactgggcccagcatcgcagagcaagtcactgggtgccagcctggagcccccattccccccagggccagtccaagccccaggcagtgagagcaggcttgaagcaggactgctgaacagttctatattgaaatagacagaggcagcagggccaagggcgagcgcagggccagcggggtgcagccccctttcctgctgtccttctggccaaggagcatgggccagactccaaagccctgctgtgtttaggagaggtgtgcaggcacgcaccgcaccgcagacggggaatgagaatttctggataactatctttctgtaagaataatttgtgggttcaggagatggctctgaggagcagttcaggttgggagggaatgccagcccagctagcgcagcccccagtgatgggcaggggtggaatcaccatcagtggtgcccggtgacatgctggaggaagctggtggccccccggggtggaccatgctggtgggagcggcggggtgggagcccctgagcccgtgggcccctgacgctctccagggtgcagtctggctcactcagccattctccaggacagctgctggggtcgaagagctcagggtctggcctctgtgggggaagagagaggggcatcagccaagcagtgttagtgtattagtgtctgctgagcctctgtcacctcctcctgatgagggtgagcatgtgctagggtcttaccagtgctgggcctttattgcccctttgtagtgatgtgatgacagctcactgcagcctcgacctccctggctcaagtgatcctcccacctcagcctcctgagtagctgggactacaggtgcatgccaccaaaaccagctaatatttctaattttttggtgcagacgggatctcactatgttgcccaggctctttatcaagcttcttataagtagattactgtgccctgagtttttgtcacagcctggaagtagctgagtaagtgctgagccttatcatatcttgacggtattaggtgtgtgctgagcctcctaagtccctaattgtatcctgaacatgggtgagtgtgtgttgagcctcctcacacactaatcatatcctgagcacgggtgagtgtgtgctgagcctcctcccaccctaatcgtatcctgaacgcacccggctcacctcagcttccatggtcatgttgtcaatgttgggcccatcctcatctcgctgcaggatggccagtggctcagcagaggccccgagatgctctccttcctcccagctgctgccccggcagggcctgtcatcctcaggcgagacctggctcagccgaatgaggttgctgaagttggagtcggacttggaacccgcaggtggcttgcgggccttgtggcggcctgccaggcggctgctgtagaaggccaggatgggctcagggcccgagtcgggcacatggtggccagtgatggctgccttgagggggaccatcatgtcggagaccgcattggtgcaggtctcaccccacagcccatgcccagcctcctgcagactcaggtcatccagctggtcgatggctctttgcatacctggtgccttctcctctcggaagaaggggctgctgccggccacactgcccatacccgcagcctccttctcctcagccagacagtagtagggggtcccatcttctgcggccacgacgggcgtggggggcttcccctccacttgcagcgagaggcggtagctgcgcagcgagagctggtagtagtgggtggtctcgtgggcactgcgcagctgctgcatggacacgaaggggtggcgcagggcagcactggggctgatgcgttcgtgtgactcccaggtcagcatgcgcttgatcagctccaccatgctcttgaggtcggcgtgctccgccagcgcctcccggtcagggaaggttagccgactggccacactgccaccattcactgtctcaatctggtccaacgacttgagcatatacttgcggcgctccaatgggcgcacctggcggggcatggagaagggggcagggttgaccattgtgcagggctagggccctgggcactcctgctgtggcacccacatgtagccccgacttccaggtctgcccatgatctgccttggagctctctggctgctaggagggccaccctggatccgtcacacccaagcccctctaatcgaacccaaatcactggcccaagttccaccccttgccccagacctccagtccccttcagcaccatgggtgcagcccctaccagcagctagcagaagggctgcccggaatctctagtcctccctggaatcaaatccaggtccctcttactgccacagctccacacttgatcccaggcctcctggtggtcaaacccagacccttcttgctatagtagtttgtcaccccctgctattaaactgccattgacttttagtctcacctgtggtcccatccagacccttcttgctgtgaaatcaagacctatgacctcaaactcctagtcccctctgctgtctaacccaggctcttgctgcacagatgggaggggcaaagccacagaggtagcagactggctgctgccccaaacctctagactcacctgaggtctcactcagatccttttttttttttttttttttttttttttgtatgtgtgtgagacagagtttcactcttgttgcccaggctggagtgcagtggtacaatctcggctcactgcaacctccacctcccaggttcaagcgattctcctgcctcagcctcctgagcagctggaattacaggtgtccaccaccatgcccagctaatttttgtatttttagtagagatggggtttcaccatgttggccaggctgttctcgaactcctgacctcaggtgatccacccacctcggcctcccaaagtgctgggattacaggtgtgagccactgtgcctggccttagatccttttttttaaacagggtcttgctgtgtcgcccagactggggtgtagtggtgcaatcatagctcactgcaactgccaactcctgggttcaagtgatcttcccacctcagcctcccaagtagcttggaactaccggtgtgtgccaccatgcctggctaaattttaaaaaaaattttttctagagacacggtcttgctatgtcgcccacaatgacttcaagtgatcctcctgccttggcccccaccaaagtgcgtggactacaggcataagccactgcacctggcctctctcgcaattctcatagccaatctcagacctcatatattctctgtggtctaatccctcttgccacacaagttgctgaccccggagctgaagctggcagagaagctgccccaatcgtcctgtcacacttatagtatgacccagatctctcttgctagagcagcccccacatctgacttccaaacatctaattctccctgcagtttctcccccagatctatcttgctgcagttgctgaccagtcccacatttgatctcatgcagctctttcttgctgtgaaaatgccctaggctgacccccaagttccagtcctcattgaggtttagcccagaaattttttttttcaattattaaaaaaatatttttttggccgagcgcggtggctcatgcctgtaatctcactgctttgggaggtcgaggtgggtggatcacgaggtcgggtgtctgagaccagcctggccaacatggtaaaaccccgtctctagtaaaaatacaaaaaaattgccgggtgtgatggtgggtgcctgtaagcccagctactcaggaggctgaggcaggagaatctcttgaacctgggaggcagaggttgcagtgagctgagaccgcaccactgcactccagcctgagcaacagatcaagactccgtcttaaaaaaaaaagaaaaaaatatttttcttttctttctttttttttttttttttttgagacggagtctcactctgttgcccaggctggagtgcagtggtgggatctcggctcactgcaacctccgccctctgggttcaagcgattctcctgcctcagcccgccgagtagctggaattacaggcgtctgccactgcgcccagctaattttttgtgtttttagtagagactgggtttcatcatcttggccaggctggtcttgaactcctgacctcgtgatccacccacctcggactcccaaagtgctgggattacaggcgtaagccaccacacccagcctctgttttttgttcttttcactccattcttctggtctgatagatttttctttttgaaacagagtcttgctctgtcacccaggctcaagtgtagtggcatgatcatagttcactgtagcctggacctcccaggctcaaggaattctcctgcctcagcctcccatgtatctgggacaataggcccataccaccgtgcccagctgatttttttttccatgttttataaagaggaggtctcactatgttccccaggctggtctcaaacccctaggctcaagggatcctcccaccacagcctcccaaagtgctggaattacaggtgtgagccacgttgcccaccctagaattttttttcatgtaacagcccccacactgactgccctcacccaacttttcccttaccttcgtctcggccaggtagtcagccgaggacttgagctgccaggggttggcagcgtcagggtgggggttgcgcttgaagaagtggtgggccttgcaggcggcgtgcaacaggtgtggcttgggcaggccctgggtttcgcagatgtagcgcacctggtcgtactcgttgttgccggggtagagaggccagcccaggtgcagctcagccatgacgcagcccagggaccacacgtccaccttctcgcagaagggcagccccagcaggatctcaggggcccggtagaagcgcgactggatgtatggctccttcacgtagcgcacctcgctgaaaatgctggcggatccgaagtcaatcacctgtcgggggtggggaagagggcgagtgggcaggtcaagcagcagggacagccgagctgggccaccccggcatctttcacctggcatcttcctgcatctgctatttgactctggccatctctgggtctgtgattctttagttgctttgttggtttttgtttgtttgtttgtttgtttgtttgagacagagtctcactcttgttgcccagtctggagtgcaatggcacgatctcagcacactgcaacctccacctccccggttcaagcgattctcctgccttagcctcctgagtagctgggattgcaggcgcccaccaccacacccggctaattttttgtatttttagtagagatggggtttcactatgttggccaggctggtctcgaactcctgacctcatgtgacccacccgcctcggcctcccaaagtgctgggattacaggcgtgagccaccgcacccagcctttgttggtttttttttttttttttgagaccgagtctcactctgtcgcccaggctaaagtgcagtggcgcaatcttggctcattgcaacctctgcctcctgggttcaagtgattctccagcctcagtctcctgaatagctgggtctacaggtgcacaccaccatgccctgctaatttttgtatttttagtagagacggggtttcaccctgttggccaggctggtcttaaacttctgacctcagatgatctgccctcctcagcctccctaagtgctggaattacaggcatgagccaccgcacccagctgtggccgtagttgttaagtccctatctctgtctcttccagcctttgtgtctggttcgagtgactgactctgtctctgtttctctccactagaactatgcaaaggagggttaggaccctattcttcctcttgcaccccacaccttgtccatcagccaacagatctagaatctgctccctctgcatgccatccacagccccgaccctggtcctatcctgcatcctttccaacctagaccaacgcgggggtctcctcgctggtctccctgctcctctcctctgccccctagtctgtctgtcacaagcatccagagggatcctgtggccgcccgggatagattgggtcctcccctgctcatagccacatcctgtgacaaaagccaaagtcctcaccgtggcccacaggtctccaatgtctgctctgtcacctctctgccacatctcccactctccccatcactcaccctcctccagccacaagggtctcctcactattccttgaacaagtcagacattcccagctcagggcttttgcactcgctgttccctctgcctggaatgctcttccctgcatgagcacagggctccctgcctcacctccttcaggtctttactcaaatgtcacctttctatcaaaaggtgaaaggcaggacaaaaaaaaatgatcaccttctcagtgagaccttccctaatcattctgtgaaagcatcagccatcagtccccatcctttctatcccccgccaggcccctgtttttctttttcttttcttttcttttttttttttttttttttttttttgagtcggaggtttttgagacagagttttgctcttgtcacccaggctggagtgcaatggtgcaatcttggctcactgcaacctcctcctcccaggttccagtgattctcctgcttcagcctcccaagtagctgggattacaggtgcacaccaccatgcgcagctaatttttatatttttagtagagacggggtttcacgatgatggccaggctggtctcgaactcctgaccgcaggtgatccactcgcctcggcctcccaaagtgctaggacaggcgtgagccaccgcacccaggtccaccattgctcttaatgccatttcacacactatatctcttaattttttattttaattttattttttaattatttatttttttgtgacggagtctcgctctgttggccaggctggagagcagtggtgtgatcttggctcactgcaacctccacctactggattcaagtgattctcctgcctcagcctcctgagtagctgggattacaagcgctaatcttttgcatttttggtagagacaggcggggtttcaccatgttagccaggctggtctcaaactcctgactcagatgatctgcccgcctcagcctcccaaagtgttgggattacaggcgtgagccacggcgcccagcccttttttcctttttagagacagggtcttgctctatcacccaggctggagtacagtggcaccatcgtagctcactgtagccgcgaactccagggctcacaagatcctcccgcctcagcctcctgagtagctgggaccacaggcatgcacctccatacccagctaattttttaactttttgtagagatagagatgggtctcactatgttgcccaggatggctcctgggctcaagtgatcctcctgcctcagcctcccaacatgctgggattataggcatgaggccctgcacctggcctctctcagcatttctctccccagcgaggatgtcagtcccacgagggcaaagaatttatccattttgttcaatactgtatccctagatgcctagaacagggcttggcacacagcaggggctcagtaaataatgagtgaatgaatgaatgtatgtatgggctttgagttccttcattctctttccatctcttgcttgtatctctctctctctgtctctcatttgagacagtggctcaccctgtcacccaggctggaatgcagtggcgcaatctcggctcaaggcaacctccaccttccacgttcaagcgattctcctgcctcagcctcccaagtagctgggactacagtcacatgccaccatgcccagctaatttttgtatttttagtagagatgggttttcaccatgttacccaggctggtcttgaactcctgggctctagtaatcctcccacctcggcctcccaaagtcctgagattctaggcatgagccactgtgcctggccatttgtacctctcgttctttctttgcaactgcctctccatcacttgcctgtctcttgtctctcagtgtctctctctctctttccatctctgtctctgtgtcgtccactaggaagacacctccctgaagtcccggtcctcttctgtcttcctcttcaggcactgttcacactcgtcacaggcctttgacacatgacaggtgcttggccaacagctgcggaaccaacattgcgaatggccgaaagcctttgtctctccccatgcctctggtggagctgtctgccattttcaccctgaatctccgtgactctctcttggcctgtttctttttctttttctttttcaggtggcttcactcttttgtccaagctggagtgcagcggcatgatctcggctcactgcaacctccgcccccatatgggttcaagcgattctcctgcatcagcctcccaagtagctgggattacaggtgcaccccaccacatctggctaagttttgtatttttaatagagacaggatttcaccatgttggccaggctggtcttgagcttctgacctcaggtgatccacctgcctcagcctcccaaagtgctgggattacaggcttgggccaccacacctggccagcctgtttccttctctgagtttttctgcttttcattcagccatttctcagttttttgtttttgttttgtgttgagacagagtcgagctctgtcgcccaggctggagtgcagtggcgtgatctcagctcactgcaaaacctctgcctcccaagttcaagtgagtctcctgcctctgccccccaactaactgggattccaggtatgtgccaccacgcctagctaattttagtttagtttttttttttttttttctgagacagagggacttcctctgtcgcccaggctggagtgcagtggcgtaatctcagctcactgcaacctctgcctcccgggttctaagcgatttatctgcttcagcctctggagtagctaggattacaggtgcccgccaccacacccggctaatttttatacttttagcagagacgaggtttcaccatattggtcaggctggtcttgaactcctgacctcaggtgatccacccgcctcggcctcccaaagtgctgggattacaggcgtgagccaccgcacctggccatccctcacctttcacttgcagaaagcagtatcatgaaatggttattaattgctattctgatcccagagtgccagggcttcagtacccaagaggctgagtgaccctgggcacttagtctatgtttgtggaatgaattcattccttccacagagacagtgggggtgataatgccggccaggtgctgtggatccgtcctgtctgtcccctgctgtgtttgtggaagtccctgcttccctgggtctctgtccttccacctcttggggcagaataatccacctttttctgtctctgtgtctctggcaagcattcatttagcactggctccatgactgcagtgctgggagatgtcagggacacagcgatgattaagtcagccccagccttgccctcagggtgcccctggttcagaagcatccagacagtatcaaactcaaaagcagacagaggactgggcatggtggctcacacttgtaattccagcactttgttgaggccaaggtgggcagattgcttgaactcaggactttgagaccagcctgggcaacatgatgaaatcctgtttctaccaaaaaacacaaaaattggctgggcgtggtggctcacgcctgtaatcccagcactttgggaggctgaggcaggtggatcacaaggtcaggagtttgagaccagcctggccaacatggcgaaactccatctctactaaaaatacaaaaattagccgggcatgggtggcgggcacctgtattcccagctactcaggaggctgaggcaggagaatcgcttgaacccgggaggcggaggcagtgaaccaagatcatgccatcatcaccccgtctctgataagtacaaaaaaaaaattagctgggcgtggtggcgcatccctgtaatcccagcaactcgggaggctgaggcaggataatcacttgaacccaggaggcggagttgcagtgagctgagattgtgccactgcactcaagcctgggtaacagaatgaaactccgtctcaaaaataataataataataattttaaaaaattaaaaaaaaaatctagggctggaagaagctgggaaaaagacaaggaactagggacgcagccaccctagacgacccctactcaccttgaccctgaaggggcagcgggtctggtccaccagcatgatgttctcaggcttgagatcagcgtggatgatagccagctccttgagccgggccagggctgtgagcacctgcagggtgactgtacggatgtggcgggcggggaggggcgcgaagttgttctccttctggaactcgaaaaggttttgctccagcagctcaaagaccaggtagaacttgagggcgtcatggaagaactcaaggaagcggatgacgtgggcctcttcagggtctaggcctcgcatgcagtgcagcagcttcagctcgttcttgatgatgcggttgcggtaggcgtcattcttgaggatcttgatggccaccatctcgcccgtgctccgccgccagcccttggctacctccccgaaggtccccttgcccaagacctcgatgatgtcgtagcagtcagtctccgactggatggtggacatggtgccgctgctgccagacaccgccctgcccaggcccctgtaccactggctctgccgcccaggcctcccgcctggctgctgacacagcaggccccccagtgggggaaagagaaccgcactcgtgtctcctcctatgaggttggcccctgcttccctggcacccccaaacccccaggccacactgtcagtctgccaggggctgcacccctccccagaaaccctcctggcttgggatgaggggccccaggccccaccgaatgggttccagcgctgttgagtggctctggttctgttgttggagacctgagccctggctggagtgggggtggggtaccaggctgggccccctcccccgcccagtggcggaatcttgcaaagaccaaacaggtgaagtgttgacagaggggggtctaatcgtgggccttgggcatacaggaatggggataaggcaggagtgaggaaaggtgggcttcttgagcttgggagatgtgatgtgtgtgtgtctgtgttcagaaaactcctgtcccagtctgtggctactgtggggtgaggttgtaaaaggccctgaatgccaggctaaggagtttggattctgttctgagggcactggggagccacagaagggctttgagcaggggagggcagggtcagatatgagtgtcagaaagttactgtatgaaaagggataggttggagcgggtaagagtggaagccccaagccagggaaagagtccaggacagggcacagatgggagaggttggggaggagagggcgaggccaatggatgagacactcaaaaggccaggagaagcagccgtgagaccgacggtttgagggaaaggcgggagctgtctaagaacgggcctagggctctgggatgaaggggcagtccccgagaaatggacatggataagaagcagcttgggggagatgttgaggccaaattagaaaatgtatttatttttggctgggtgcggtgggtcacgcctgtaatcccagcactttgggaggccaaggaaggcagatcataaggtcaggagatcgagaccatcctggctaacacggtgaaactctgtctctactaaaaatactaaaaattagccaggcatagtggagggcgcctgtagtcccagctactcgggaggctaaggcagaagaatagcttgaacccgggaggtggaggttgcagtgagccgagattgcaccactgcactccagcctgggtgacagagcgagactccatctcaaaaaaaaaaaaaaagtgttcatttttatttatctttttaattttttgtagaaatggggtctcactatgttgtccaggctggtctcaagtgatcctcctggcctcaagtgatcctcctgcctcaaccttccaaagtgctgggattgtagacatgagccaccactccagccagattagaatatttaacagcgggccgggctcggtggctcatgcctgtaatcccagcactttgggaggctgaggcaggtggatcacctgaggtcgggagttcgagaccagcctgaccaacatggagaaaccccgtctctactaaaaatacaaaattagccgggtgtgttagcacatgcctgtagtcccagctactcaagaggctgaggtcggcaggctgaggtatgagaactgcttgaacgcgggaggtggggttgcagtgagccaagattgcgccattgcactccagcctgggcaacaagagtgaaactccgtctcaaaaaaaaaaaaaaaagtaaaagaaaatgtaacatcaaaacatttaaacaaggatgaagttctttagaagtcttatctgatccttacaacatacaaagtagggattttatggaagagaaaatcaaggcacaaagaagtttttaaagtgcctggccaggagtggtggcttacgcctgtaatcccagcactttgagaggccaaggtgggcggatcacctgaggtcaggagtttgagaccagccttgccaacatgacaaaacctcaactccactaaaaatacaaaaattagctgggcatggtggtatacacctgtagttccagctacttgggaggctgagatcgggaggctgaggtatgagaatcgcttgaacctggaaggcggaggttgctgtgagccaagattgcaccactgcactccagcatgggcaacagagtgagactctgtctcaaaaaataaaaataaataaataaatgataaaataaaatgcctaaggtcactcaagtgactgccagagacagcctctgaccctaagcagcctggctccagcgccaaactctgaaccaccacccacacaacctcctaaaaaccaggagacctctggagaaggggtgcagaagctgctgggtccccaaggggatgcaggagagagtttgggagttgtcagcacagagaggaggcgtggaagccatgggggagggtgatgcaccctagggagggtgtgggggtggacaagggcccgggaggaacctccggtgcccaaggagcacggggagagagaggtgtggggaagaggagcaagtgtcaggaagatcgaaggggccttgaagagtcaggacaagagagacaaaggaaaccctcaggcgtggccacggggaggtcactgctgacacagacaaggtaggaggaaaaccccaaatgctggggtcttggaaatgggggtgcactgtgagtgtagataactcctgccatgtttggtgggggcaaagaaaaagtgtgtggtgagacagtgacctgaggagggctggctggaagggacaaggtactcaagtgagtgggggattctgccaggcccctcatccactgagacaggatagggagatgtgaggagagtggggggctgtcggggcgagacttgggactggatattgagtctccttagtccagtgtgggacatcacagagagacatggaggaggctggaggccctgctgggagcctcaggacttagatcctgaattgggatggcagggatggatggcccatggcccctgggagctgagaccagcactgacaggtgctgaggaccctgggacctagttccaagaggcggctgtgtttctggggtagaggctttgaggggaccaggagcagccttcctgggtggggccagagtggacagggcagtcaaaccagccagacaggaaagagaaggccaggatgtgcagaagtgccctcaccggcagagggcaggtggggagcaaccagcctggtaggagtgggtcccccaggacaggcaggcttcctggcagaggggtcccgaagctgtgctctgccagggaacatcccagagtcctctttaacaacccctgggaattctcaagggctagggacgtctcccttcccaccacggcctgtcccaaggccatcctgagtctttgtttttgtttttgttgaaacagtctggctctgttgcctaggctggagtgcaggggcaccatcaaggctcactgcagcctcgacctcccgggctcaagtgatcctcccacctcagccccccgagtagctgggattacaggcacgggccaccatgcctggatattttttgtattttttgtagggatgaggtttccctatgtttcccaggctggtcttaaactcctgggctcaagcagtcctcctgctttggcctcccaagtgctgggcttacaggcatgagccactgcgcccaacccgccctgactcttctcagaccaggtatgaccggtttctcccctcacaccagaggttcccctcaggccaggctcaggcgacccctagaacctcctctttggagactgccttctctgcatctcccctatacccactcctgcccctccctgccccctatgcacacagaggagacaaatacatggctacttccagattattttattcacatggcttggtggggtacaggcactcctgccagagagacaggagcaggcctccctgccagccctggtcagtcacccacctcccggccctcttagggttagtgctagttatcacacacacaacagcgagggggtagagaaaggaaggcaagaagggatccccatctgactaggggcttcagacagccgcagcctgagccccctccatcctggccgggcctggagcccctgtctctgaaaaccccacgctgggcagccgcacccgcaatccaccctcttcctggtccccactcccactccgggccttggggcttagggacaccctggggaagcggaacttgggtgacttctctctgacgggggacttgggggctgcatcgccctcctgcccccgagaggctttagaaggggccgccaggcctacacgtggcaagcggacccggacccggccccggcgacccgaggccccttccccactgccctcttcctcctcctcctcctcctcctcggggctgggggacccttccccagtgaccatctcactttggctgaagcccactcggggcagcctgagtttggggctcttggccttctcaccctcctcggccccctccttggcccgcaccaggccaaaccggggcagccgtaccttgagcttgtgtccggcctctccctccccctctgccacctggtactcggcatggttgcccccggatggcgagagctccacgtcgggcagtgagaggcagaaggtacgctcggcccctgggggctgctcctcagcaccctcgccccccaccctagctctggcccccagtgtgggcaacttcagcctcagcccaccctcgcctgtggccgcctcgcccgcctgtgcctctcggcttagccccacgtccagctcaagctggggcactgtcacggtgggcatcttaaagacaccctcacccaccagcagctcaccacctgcaacctgggctccaggcagagacagggtcacctggggcacctgaaccctgtagcctgctgtgccctctgctgaagggactgtactctgagcctgctgccctggggtacctgcctccccaaagccggtcagctccacctgtggcagggagatgcccagcggaggcatcctcagccccgcgtcatggccctcagtgaccacctgcccggctgtggacaccttcaggcctgacagctgcattccactgacggccacagccccctctgccctcccttcctcctgggcgcccagcgtgaccagctccacctcggggatcttaagctgcacagcggtggactcagccttttcccccgggctggcacgatcaccttgaacttctgcttccttccctcgagccagcccaaaggaaggcatcttcagcttgggcatcttcaccctcccatcccagccccagcccttgccctccaactcagccacccctggcactagttctgctgcctcagtgtcccggcctctgaccccaaacttggggagagcaaacctgggccccttgaacttgaggtcggcccctgccacctctaccttgcctgagggcaggtgggcatccaggctgagctgtgggatggacagatcgagggcaggcagcaggcctgcctccccagcccctttggcctcagcctcagcccccacccgagccttggggagtgagatggcaaatttggataccttcagcttggtagctcgcccagccccctcagcctctgccttagccacctttggccccgagagtccaaacttaggtaaggagaacttggaagagggcttgacttttgtctctatcatctccagccgcccttcctcaatttccacggcgggcagctgtggggtgacaatttcaacagagggcactcggaagcccacttccctgacccctgctgccacctcagggccctccacccgctctcccttgcccattttagcggctgggacctgcccctgcaggccaagtgctcctggcaggtctagctccactgaaggcagagtgagagaggggacacccacatgagcctcaccatccacctctggctgcagacagggaagtgttaccagcttccctgagacctcagcacccgcctcgcctggcttgccacgtgatggggactctgccctccctagcttgggcatggtcatcttgggcatcttgaagccaaattccatcccttctgcctgttctgccttggtggcctttagctgcacctccggagccctgggcagcttcacctctggtgccttcggaagatgcacgtcgggaaccttcggcacttgcatttccggcagccgaatctctgacactttcggcagctgcacctcggggaggtgcacatcgggcacagccatctcaggcaccttggggagttttatctctgggagcttcatgtcagggactttcatttcacagactttgggcagctgcacctctgggaggtgcacatcgggcacggccatttcaggcaccttggggagtttcatctctgagacttttggcagctgcacctcggggagtcgaacctctggcacagccatctcaggcattttagggagtttcatctctgggactttcgggagctgcacttccgggaggtgcacatcgggcacagccatctcgggcaccttcgggagtttcacctcagggagtttcatctcagggagcttcatctctgggacttttggaagctgcacttctgggaggtgcacatcgggcacggccatctcgggcaccttcgggagttgcacttcagggagtttcatctcaggaagtttcatctcaggcacctttggaagcttcatctcagggactttcatctctggcactttcggcagctgcacctctggaagccgcacctctggcacagccacctctgacacctctgggagtttcatctctgacactttcggcagctgtacctctggaagccgcacctccggcacagccatctctggcacctttgggagtttcatctccgacactttcagcagctgtacctctggaagccgcacctccggcacagccatctctggcacctttgggagtttcatctctgacactttgggcagctctacctctggaagccgcacctccggcacagccatctctggcacctttgggagtttcatctctgacaccttggggagctccacctctgggagtcgaacctctggaagggctgcctcgggcacttttggaagcttgacctcaggagccttggggagcttcacttcaggtcccttgggcaccttgacctcgggccctgacactccgatgccaagggagggcatcttgatggtgggcagcttcagcttgctctctacaacttcaggagcagcgggccggggctccaagagggaaagcccaaaggtgggcattcgaagtctgggacctttcaccctggcctcagggctgaccttggctaccttggcctcagcaacttcctttgctcgagccccaaatcggggaaaactaaggcggggcatcttcagggccacctcaggtgcctctccccgggcctccacctctgcacccggcaaggccaggtccacccccacagtcggtgctgccacatccagggtgggcaccactaccgacacagccccttcccgggtctctaggcagggaagtgtgggcagagtgggcagtgagggcaaggcaggcagctccacctgggggacctggattcccacggctggggcctccacagcaggcggagccggggctccgagcccaagggttggcaggtggagggcaaagccaccagctgcctctgctgagggggcagccttgggggctgagacctgggggacacccacctccgcccctggcagccgcggcccaaccagctccacctgaggggctgtgaaacgagctcctgcagccacctcagcctccaccttggctttcctggggggaggagcggcggcggccagccgggctgcctgagcctcttcggccacttctcgtacacgcagccgaggcagctggaggcgccggcgggcaggggcagccgggacaggacccttgacagcctcggctttgaggccccgacgcaggcgggagaacttgggaaaggagaactcgacgtcaacaggggccaggtcagcggggacccccagagccccaggcaccatcttcttcttcttcacaggggacagactctggatgttctggggagagaggagagaggcaggaggcggtgggacagtgggaggctgggagtggacaggaagagccccacctggtattggaccaggcgggggatgtgctgggtcaagtatcttgttccccaaacatcatccccacttcttgcctgtcatttcaccatgagtgcccaggaaagcaggcagccatctaggatctccaaatgagtcaacaggagtgtagggacggggacccaagacttctagatcctgatccgggattttccccaacatcctcattctagagatggggaaactgaggcccagggagagaaacaactttgtccagggccactcagcagtaattgggccagcactcaggctggaatctggctttcctggttcgaagtagcctggttcaggacccctagcaagcctggatccgatggtggggacgcctctccgaggtgggtgagggccctgggctggggtgggtctgtcccccttcccggggaagagtttggggcagagaggaaggggcagagggtggaattagcttgggttagtgacaagacagagggcaaggctggcccacgatggcggggaatggggctcacggcgcagagaccggatcgctggggcagtccagggccggggccgggctaagcacgcgtaccagcttggccaccttggcccgcgggcccttgatctcgtagccagacacggtcccgggccgcagagccaggtccccggtgggcacagtgcgcttcaggcagaaggagactttgtaaggctcggcgcattgcagcaggcgtagtgcgtcctcgtacttgaagttctcgaagaacactcgggcactcagcagctggtcccctgcgggcgaggtggaggtgcgcagcacgtgggcatctcccggctccgcccgggcctagttctgcccacttgcacggagccctcgcggtgaggacccgccccaaattttagtttctccaatccccagcgcaggattaagtcgcagttacgctagtccccgccccatgaccttatccccgccccctgcaatgaacaaagccgcgcccactcaggccacgcccgcaccttgtcgctcccctacccatccttacgtttcagatactgactttgcttcttttaccgagagaacagaatcagaagggaacttccagaatctcccacactgtgtgttcaccccctttctcctgcggcgacttactccattcgccttcctgttcctggggatgaactaaccccactcctagctcagggcaatctctccaccgccttctcagggacatcctccagcaattctctcctcttcccacgtcatcagttgtccttctcgtctacattattcccatcagcatacaaacatattattatttctcgcataagaaaggttgtcatggcctcactcccccggagctcctgccccatttatctgttcaccttaataggcaaaaggtattgagttctccagtggcattgttaccagttctccagtcacacctctgaccctgctttccaacacgcacatctgaactgctcctctcaaggttccaggcagtgacctctgtatagtaagtccaagggtcaagtcccaggcctcatctgcttaaaccactcagcatctgatctaacctcactctctgtcatatccttgcttcccttggcttccaaggtgctacaccctctggagcgtctctgggagttccttgtcagtctccatagatgtttgctttccctctccctgatttctttctttcttttctaaacagtctcactatgttgcccagtccaatctcaaattcctaggctcaactgatcctcccaccccagcctcccaaaatgctgatattacaggcgtgagccactacacccagctttctttcctttctttctttctttctttctttctttctttctttctttctttctttctttctttttctttctttctttctttcacccagctttctttcctttctttctctttctttctttctgtctgtctgtctttcttttcttttcttttcttttttagatggagttttgctcttgttgcccaggctggagtgcaatggcgcgatcttggctcactgcaacctctgcctcccgggttcaagcgaccctcctgcctcagcctcctgagtagctgggaccacaggcatgcaccaccacacccagctaattttgtatttttagtagagacggggtttctccatgttggtcaggctggtctcgaactcccgacgtcaggtgatctgcccgccttggcctcctaaagtgctggcattacaggcgtgagccaccgtgcccagcccctcctcttttttttttaagacaagatctcgccaggtgcggtggctcatgcctgtaatcccagcactttgggaggccgaggcaggtggatcacctgaggtcgggagttcgagaccagcctgaccaatatggagaaaccctgtctctactaaaaatacaaaattggccaggcatgttggcacatgtctgtaatcccagctactagggaggccgaggcaggagaatcacttgaacccgggaggcggaggttgcggtgagctgagatcgtgccattgcactccagcctgggcaacaagagcgaaattccatctcaaaaaaaaaaaaaaaaaaaaaaaaaagacaagatctcactcttcacccaggctgtggtacactggtgcaatgacaaatcactgcagccttgaacttccaggctccagcgatcctcctgcaaatgcaggcccgtgccaccacacccagcctctctggcctcttaaagacacactaccccagacctcaggacttggacctcctctctgtctacatgctcaagtcaccccttgggaattcttgggaagttcatccagattgagaagttaaaagaccataaatctgctaacaattcccaagtatatctctccagtccagcactctcccctccaccctagactcacatccaacatctccatcatatctccacctgggtgtcccacaccacacctctcctttaacagatccaaactgtactcctggtctttcttagtactagcctcagtgtgctccttttgagggaccagcaactccatcctcaggtcaaaaatccccagatccatcctggacaaccctctttccatcatacccaatatccagtcctcaaagctcctccttcaaaatatattcagaatccaaatatatatatacctccaaaaccctttggtcctgagcatcctcatctcttacctggataatcacagtagccagtttgttgatctccctgctcctaaacctgccttcatatattctactgtttgttgttgttggccttgtttttgaaacagaatcttgctctgttgcccaagctggagtgcagtggtgtgatcatggctcattgcagcttcagtctcctgggctcaagcgatcctcccgccttggcttccccgagtgctgggattacaggtgtgagccacccaatgcttggccatactctactgttaatgcagcagttcagcacagtcaattcacgtttctccctgctcacagccctcacagaataaaagccaaagtcttataaagccctctaaaaagtgtcctccccttacctctctggccttctctcttactctcctcttcactaactcaattgcgtagacactggcttcctcactgtttctaccacaagctaggcatggtcccaccttggggcatttttgctgtctgttccctcttccagatggcctcatagcttgttcccttacctcctttagccttttcaccctttccagcccacccctttttttttttttttttaggcggagttttgctctttcgcccaggctggagtgaagtggcgcgaactcggcttactgcaaccttaagcaattctcctgcctcagtctcctgagtagctgggattataggcgcctaccaccacacccggctaatttttgaatttttagtagagacagagtttcgccatattggccaggctggcctcgaactcctgacctcaggtgatcagcccacctcagcctcccaaagtgctaggattatgcacccagccaagcccacccccatttaaaaatgcagctgtaggccggcctcggtggctcacgcctgtaatcccagcactttgggaggccgaggagggcggatcacgaggtcagaagatggagaccatcctggctaacacggtgaaaccccgtctctactaaaaatacaaaaaaaattagccgggcatggtggcgggtgcctgtagtcccagttactagggaggctgaggcaggagaatggcgtgaacacgggaggcggagcttgcagtgagccgagatcgtgccactgcactccagcctgggagacagagcaagactccgtctcaaaataaataaataaataaaataaaataaaataataaaaatgcagctgtagcacattgtcctcctggcaactgtagcacttactgctttctaatttactaggtattttacttaatttgcttaaatatgtctctcccggctgggcgcggtggctcacacctgtaatcccagcactttgggaggccgaggcgggcagatcacgaggtcaggagatcgagaccatcctggctaacacggtgaaacctcgtctctactaaaaatacaaaaaattagccgggcgtggttgtgggcgcctgtagtccctcccagctactagggaggctgaggcaggagaatggtgtgaacccgggaggcggagcttgcagtgagccgagattgcgccactgcactccagcctgggcaacagagcgagactccgtctcaaaaaaaaaaaaaaatctctccccactggaatgtaagctccataagtgcagggactgttgttcagttttgttcacggctgaagcccaagcagctaagataatgtctgacatagggtggggcacggtggctcacgcctgtaatcccagcactttgggagactgaggcggatggatcacctgaggtcgggagttcgataccagcctggccaacatagtgaaaccccgtctctactaaaaatacaaaaattagccgggcgtggtggaggggacctgtaatcccagctactcaggaggctgaggcaggagaatcgcttgaaccagggaggcggaggtggcagtgagccgagatcgtgccattgcactccagcctgggcaacaagagagaaactccgtatcaaaatacataaataaataaagtctgaaatagaaggcactaataaatagttgttgcatgaataaatcacgtcagcttcatccatatcctaaaacatcctttactcttcccaacccctctaagtggctcactccacccttttctcctgccccaacaacaaaaacatttactagcactcacatagttaagcactatgtgccacttagctatgtgctaagtgttttcacatactgactcgttaaatcctcaatacataataaccccatactagaataagtcccatttcagagatgagaaaactgaggcacagaaagatcacaagctagtaaacgggggatgtgaaattcgcacccagacagtgaacctccggaatttgctgtgaacagtcagcaaagccccgccccaagcccttaacccctcctggtcgccggtcacgcccccatcccccggtcagtttcagcctctctttggacccaaggcagattcctaaccccgcccccgcagttcgaccccgccccacaccccgggcccgcccaccttcctgcaggctgaggctcctggcggcgggtgagtcctcgcgcagctcccgaacgaagattccctctttgccgccgcccgctacgttgatgccgctgaccccggtctgcgcctccgtctccacgataatttccaccaactccgcccgcctcagctcctgcagagggcggcgaggtgtcgcgttggggctctagggccggacctcgcccagagcccgccattgcgctcaacagtggctcatatacatatatatgtttatatatatttagagacgggggtgggggacggtctcgccacactgcccaggctggtctcgaactcctcctgggcccaagggatcctcccgcctcggcctcccaaagtgctgggattacaggcgtgagccaccgcgcccggccaaaagcggctgttcagcgggccttcagggcacacgcccctcggcgctgccctcgcaggacgtcggggcacacccactccggcgtctcccctttaagcaagcctgagggcagctggctttctaggacccgcggaacggttaaacagctccgcgggccggctggcctctccgaggccctggagcggcagccgaaaggggttaggggaggagacggggttgtaaggggagggactgcgtcggagtgggctggagataacttgagttgtgattgagaggcgggaccaggatcgtgggggcgtggtcaggtcgggagggcggggctggggggggttggtgcgggtaggaggggtaagacaacacaggcctgagaggaagagccaaatggggtatagaagggtgcaaaagataggagaggaatgtggccagagtttatgggaggttatttggagctggggcggagacccttattatttttttgttgggggagacagggtctctcactctgtccccaggcttgagtgcagtggtgtgatcatggctcactgcagcctccacctccttaaactcaagcagaccttccgctccggtctcccaagtagttgggaacataggcacgcgccaccacgcccagctaatttttaattttttttttaagagacaggggtatcactgtgttgcccaggctggtctcaaactcctggcctcaagagatcctcctgtctcagcctcccaaagcactgggattacaggcatgagccactgcatctggcccggagacccatattctacaaactgaatttaactatgggggaggggctttaattacagcagaacaagagaatagttgaggatgggattctgaggaaggggctggctggaccttcaagccctctgggattggggggacagggagtgggatttgcctccctgcaggcttgaatgtgtgtgagaatgtgctctattgtaaattcaatgacccgaagacctgtgaaacgcccacaggagagggaatccagtgaagggggtctgcgtgggtaatgaatgggactgggagacatggcattcccggtatttactgtaaatgatgcagattggacctggcccagaagccactatgggattcacaatagggcttcccagaagaggcagtgacaaacctggatcctgtctaggaatccaatctgctgtgtgtcttaggaagaatcttgccctctctggacccacttccctgctgcaaaatagggtaacataggcatactggaaggaggttgcagtagggatctgagaggacactgtcatggccaacgcactggggccagcacggactggaattgagcccaggacttggagggagagcaggtctaggccagatgccccacagcagtggccccaagggactagggggctgagcagggcagtctgggtaaggagagttgtggctgggactgtagggaacagcatgaccaccagtaccgccctttggctcagcaggccctgggctcagcattttatgtgcagaatctcttttttttttttttttttttttttttttttgaggcggagtctcgctctgtcacccaggctgggagtgcagtggcacaatcttggctcactgcaacctccacctcccgggtcaagcgattctcctgcctcagcctcccgagtagctgggattacaggtgcacgccaccacgcccagctaatttttgtattcttagtagagatagagtttcaccatgttggccaggatggtctcgatctcttgacttcatgatccacccgcctcagcttcccagagtgctgagatgacaggcatgagccaccgcgcccggcctcttttttttttttaagagtcggagtcaggccaggcgcggtagctcacacctataatcccagcactttgggaggccaaggcgggaggatcacctgaggtcaggagttcaagaccagcctggccaacatggcgaaactccatctctactaaaagtcctaaaattagccaggcgtggtggtgggcgcctgtaatcccagctactcgggagactgaggcaggagaattgcttgaacctgggaggcggaggttgcagtgagctgagatcgcaccactgcactccagcctgggtgacaagaccaagaatccgtctcaaaaaaaaaaaaaaaaagagtcggagtcttgttttgcccaggctggtctccagctcctgggctcaagggatcctctggcctcagcctcccagagtgttgggattacaggtgtgagccatcgaatgcagtctgcaggatctcatttcatcctctccctatagccttgggcagtcacagaggaggacactaaggcccagagaggtaaagtgacttgcctaatgccctgtagcaagttaagcggctgggcctcaaccttaggtctgtgaccccagaactcataggccatcctgtgggcagagaactcctggcgctgtacccactgcctctcgcccccagtagcagcttggcccctgtaacagtagacccgctctgtgcctggtatacagtaagacatggtcaatgccaatccaccatctcagtaacagtgacagcagctgtcattcaaagaggcttcctcagcaccagactctgtgcaaatggctcaagcgggagttctcagaggtggagatcattacctccatttcttttttttttttttttttttgagacagagtctcactgtgaccctcaggctggcatgcaatggtgtgatctcggctcactgccacctccgcttcctgggttcaagcaattcttctgcctcagcctcccgagtagctgggactacaggtgtgcaccatcatgcccggctaatttttgtatttttagcagagatggggtttcaccgtattggccaggctggtcccgaactcctaacctcaagtgatccgcccgccttggcctcccgaagtgctgggattataggtgtgagccactgcgcccagccccattacctccatttcagtgggaaactgaggctgaaagaggtgagatcatctgcccagggccacacagctgaagtggtagggttgggatttgagccatgggtccaagcccatgtccttaactcctacattatatgcccttgtgtgtgtgtgtgtgtgtgtgtgtgtgtgtgtgtgtgtgtttagacagggtctttttttttttttctttgtttttctcatttattctttccacacaggagacttaatgagacaggatcttgctctttcacccaggctggcgtgcagtggttcaatcatatctcactgcaacctcaacctcctgggttcaggtgatcctcccacctcagcctcctgagtagctgggactacaggaatgcaccaccaaacccggctcatttttttttccggtagagacagggtcttcctatgttgcccaggcttgtctcaaactcctaggctttagcgatcctcctgcctcggcctcccaaagtgctggaattccaggcctgcgccactgcacctggcatatgctgcctcttctgatgaagggtttctgccggattttcttcagctccttattaatttagctcctttgtgcgccagtgatttcactgccttgagtcttagcctgtgccagatgctgcactaaggacattacatatgttaattttcttctcctcacagtgacccataaaatagaccctgttattatttccatttcacagatggagagaatgaggcacagagaggccagaaagtgtctccttgctgccctagtctgtgcctccccattgccctcaagtgcgccttgcaggacacgtgggcactcacctcggcactccggctcctggcctccatggcgttgctgggaggcacctgcaccccaggctcctgtgtcctctcccctttctgctgcagaaccagcttcagttctgcatggagcagctgcctctgagcctgtgggaggacagcagtggaggcttgaggccagtaggggacgagaggtggaggccatgcttacagggagaaagcagggtgggtattagaaggggagaagggcccccaccccagctgtcctctcaccgctgcctgggtgcaggcacttcctcctaacaggagcccagcccgaggtgccgcacagctgtctgcagggctcacgcccttccgtggggttcttgctgcctgccagggaaaggccaggatgtgaagctccaggcaggcgaggaaggggtggggaggggcatatggcaccagcctgcgctcacctgagggtcacctccagctccttgggcctcctgggtccggcgctctaagaagaataatgtgagcagtgttattggctaacagccaccgatgacttcctgagtgcctgaccctgctgcgttctgctgataccctatccccgtcgtgcaggtgggaaactgagcctcagaagacctttacccaggatgactcagctggacaacacacggtaaagccaaaactgactccgaggcctgtctggcagcagagcccccgtgccaaagatcttggccaactgagggggccaaattcactaaaaaataattgctatttgagacagggtctagctctattgcccaggctggagtgcagtggtgcaatcacggcacactgctgcctcggtctctgggctcaggcgatcctcccaccttggcctcccgagtagctgggaccacaggtgcatgccacaacacccggctacgtttttgttgttgttggtggtgtgtgtgtgtgtgtgtgtgtgtgtgtgtgagagagagagttttgctctgtcacctaggctggagtgcaatggcgcgatcttggctcactgcagcctccaactcctgggttcaagtgattctcccgcctcagcctcccgagtagttgggactacaggcacgcaccttgggactacaggtacgcaccgccatacccggctatttcttgtatttttagtagagacggagtttcaccatgctggccaggctggtcttgaactcctgactgcaagtgatcagcccaccttggcctcccaaagtgctggaattacaggcatgagcctccacacctggcaacaccaggttaattttttaaattaatttgtagagatggagtctccctaggttgcccaaactgagctccaactcctgggctcatgctatcctcctgcctcagcctcttgatgctataaaataattatagccactcccatgtactcccagtgagcaaatcacagctcctctctgtgcttcagttatgttgtctataaaatgtggagaataagagcttttacctcgcagggctgttccgaggctcaaatgagttaataagtgtaaagtgccaggcacctggcaggtgctttataaatacttgctattattattattattattattattattattattattttgagacagagtctcgctctgttgtccaagctggagtgaagtggtgcgaattcggcttactacaacctctgcctcctgggttcaagtgattctcctgcctcagcctcccaagtagctgggattacaggtgcccaccaccacgcctggctactttttgtatttttagtagagatggggtttcaccatgttggcaggctggtctggaactcctgacctcaggtgatccacctgcctcagcctcccaaagtgctgggattacaggcatgagccactgcacctgtcaggccattattattactaagaacttcctatggccctgaccttgtgtcgagcgccccacatgctccactgcacatggccctcagcacagccttgtgcaatcagctactactgagcccattacagaggagacacctgaggctgggggaagggatgtcactagcccaggtcacaaatggtcgagccaggacttgaatttgtctgaaggctccagccctttatctgggtagtaataatacctgatgggtactgagtgattagtatttgctggcccccgtgctaagaccttcaccttctacttcacctcggaaaaccccatttcctgagaggccaaaagaacttgctcaaggcctcatagcacagccagaaggaggcaaagctgaaattcacatgcagccacccgccaggcccatctggggaaatggagatgaatactctctcccccaacccccgactctgggcttgtcctcacagcccccacctggcatgccaacccgccaacccctattgcacagggaaaggtcaggcctcacgcggcacattccctcacacaatggcccgtctgctgtgctcagttgcattccgcccctgcccacccaccctggccacacaatggcctttcatagcccatcagtggccaggagagaggacatggggaccccttaacactcccacagcacccacgccccccacagtgtaagagggcttctctctgcatctcctagggggtcctggtctctgtggccttccctgggatcccctgtgagccccctacaccttccaggctgtgccaggacttgaacttgtctaaaaactccagcacgggctgggcgcgtggcttaggcctgtaatcccaacactttaggaggccgaggtgggtggatcacgaggtcaggggttcgagaccagtctggccaatatggtgaaaccccgtttctactaaaaatactaaaattagccaggcgtggcagcgcgcgcctgtaatcccagctactcgggaggctgaggcaggagaatcgcttcagcctgggaagcggaggttgtggtgagctgagaatgcaccactgcactccagcctgtgcgatagagcgagactccatctcaaaaaaataaaaataaaaataaaaaaagctccagcgctttagctggacaatcataataacaactgatgggtattgagtggttagtattaatattagctggtccctgcactaagaccttgtctgccatgtctggggcatttcctctgaattgggccctgtgctagcacccacaggcctcaaaatcaccctagatgttgtggctgttatggggtggaaactgaggctcacagaggggtcacccagccagaaaggggcagagctaggacccgtgcctgcccttcacccctgcttcaccttaatttgcattggtggctctgcgcactggggcaggagctgggttgggcaggagggggccaacggtgctagaaacacacccaggccaggtgccgggcctggaccgggcaggcgctttacatacttgaccttgtgggaccccatttaactgatgagtcaatgagagttaagagaccggtgatcacagtgacagagtcgagacttgagcccaggtgtgaaagcgaactcagttcccttacccaggactgatacacagcacagagtcctgagctggggacacgagaagcctgaaccttgtaggtggtagtagagggggtctcctgggtcatcagctctctgtcccaggcccgtggctgtgagggtcatgcccggagcctggcacaggaagttcaggcggggcagggacaagagagagtgccctccttcttcgtccctgcctggacaggcacccagcccaggttatatttagcccaactgtgctcttcctgagccacgtacccagcccctggggtaaggtgggggcagcttcggaaggaaacccacagagaggactctgtgttcccagctctgcctatcccactaggcaggggaaagaggggtggggaggctcctggggagggtccctgccttgtgttagaggcagatccactgggaccaggcagacactccagatgccagcagcctatttcttgggtagttactgtggcatgaccctggcatatgccagaactttcagaatccccagggtccccatttcttgagcacctactgtgtgctaagatccttcctgtcttggctccttaaatctttgtaacatctccctggagtgggtacaactgagatatccatttcagatgcgacttatgcccttcagagcagctgggagcgaggggttgtcattcggaggctgctgagggatcggctgagggcattgcccttctggccctctttccctggtgactgccaccaacttcacttgggaaccctgcctgctcagagcctcagctttcccccgccaccagcgtgatctctcatagcaatgggggtcaggggttgggctgactcatccagacctctaaacattatctgaggccacctagggggtcagggggagttaaggcagtggcctctggctgcctcggttagtccctgctccagcacttcccaggtgtgaggacttgggcaagatccttcatctctggggcctcagtttctccatctgtaaaatggagccaataagaaaggctttgaagatttgtgagagaacagcaggtgcttagaatatccctcctgtatagtaaatgcttgattaatataaactcgtctctgacagcaacagggagagtatggagggagggagctgtgcttctcacagtgttgcacatccaacctttgctcctcagtggcccccactttctctgctaccaaaggggagctttggctgagagacaaaacccagctcaggcaccagcctcccaacaggatccatgctgcctccctagcaccctactccagggacccaccccaggcctcctgccccagctctggtgtttgttagtttgttttttggagacagggtctccctctgtcactgagactggagtgcagaggtgtgatcacggctcactgcagccccaacctcctgggcccaacccaatctcccatctcagcctccagagtagctggaaccacaggcatgcaccaccatgcccagctaattaaaaaaaatttttttttgttttgtagagatgggggcctctctatgtggcccaggctggtctcgaactcctgggcttaagcagtcctgccgcctcagcctcccaaagtgctgggattataggcatgagccaccatgcctggctgccctagctctttaaaagcagcaactcatttactcggcaccagccctgtgaggtggcctccagacatcagcccattttagagatggggaaacagaggcacaaaggatgaagtatcttgcccaaggctgcacagccagaaaggagaggaaaggggatttgaaccaccagctccaaagtctatacctttaacacctacaccacacggcttcctgagcccccaggccccctcccagcacctcccgggaccctgaacctcattcccacagtgtctcagcctggccagggaagggaccggccggctgatctcttaccgctgagcctccagacacctcgagagctcctggtcccgtctgtcagccctagccctaggctgggggggaaaaggaatggggaggggggaggagagagagaccccagccattggctgcgggggtgtgacgtcaccagagggtgggtggtggagaaacaaacatccccctcctccagctacatctatccccaaggggtgggggccacgggacagccaccagccgcctctctcttgcctgggccgagatctctgccatgagctcagcttcaaggatttgcacgttggcttcctcgacttggagaatcaggaccccaccccagccccactgtttcctggctccaggacccgggcctggccaactgcctctactgtaaactcctttcactccctctccctgtcaacttgggttcaaatcgcagcgcgaccacttcctcgctgggtgacctgctgccagtcacagcttctctttgcggatagtaagagtacccaccttatggggctgtggtgaagattaaacgagttaaaagagactgaaaatgtaagacaatgccgggcacataatgagggttactaataagtatttggtattatttttcacacaaattaggtggctggctcatcttgctggggggttttggccccttttcagtaaggctgggcacaggggacccccagttctctgtctaatggagttactgtttagggggacacctatcacatactaagtaccatgctcagtgctgaagccctgcttttgaatcaagggtgtaaaatgggctccttatgctccccacccttttttttgagacaaggtctcactctgttgcccaggctggagtgcagtggtgtgatcatggctcactgcagcctccacctcctgggctcaagcaatcctcccgactgagccccctcaaatagctgggaccacaggtatgcatcatcatgcccagctaatttttgtattttttgtaatggcaaagtttcaccatgttgcccaggctggtctcgaactcctgggctcaagcgatcttcccacttcggcctcccaaagttctgggattacaggcgtgagccaccgcgtccagctatgcccaatttatagctatgtggccaggaggtggtgaagctgaggtccaacccctgttctcctggaccacaaaaaccctgctacactcttctgccccttccactttgcagaccagaaggctcagagaaggtaagtgactctcccaatatcaccatagcaggtcattggcaggggtccagagttgaacccagacctgcccgactcccaagccaaagctaccaggcctcacccccaacccctggaccctggtccagcccccagcctgccctgactcaccagaccccggggggcggcacagggagcacaggtacccccacatgccacttgaacccacccggctgctgcctcggaagctcgtcgctctctgaacccaggccccaggcctgggctgggctgaggctgggggattacccccaaagcgcatgtcagcagcttctgccccattgtccagccaggcacagacaccaagccctggcctctgtcggcaccctcgcccctcacaccagcctgggtggcccctctgcagacctgtcccccatctcacaccagagggttggggcctacttcagagggcgtgggggaccaggccaggatggcaggatcccggaatgctgggggcctccctcccttctctctgaaatgccccctgcccactctcagccaccggggaaggcaggaatgtgctgagctctgggaaatgccttccaggcctggcagcaaccaagcattggggtgtggccagaagccagccagagccctcctcccaggaggggtagaagggatggtatggtcggggctcccgatgggcctgaggagaccctcacttcattgcagtctctctccttcattgattcacgcaaacattcttttgttcctatattcattcaacaaacactcacaagccctgtttagtggtaggtcttttgctgggcacaggggacatcaacagatctaactccaccccagggaggaggcggcaaactcaggaaaggatcctgcaggaggtgatatcggcagtcaaactgaattagccaggcgtggtggcgggcacctgtgatcccagctactcgggaggctgagcaggagaattgcttaaacccaggaggcagaggttacagtgaggcaagattgcgccattgcactccagcctgggtgacagagcgagactctgtctcaaaaagaaaataataataaataataaaaggaagtcaaaatggaagattgaggaggagggagctaaggaaaaaaggagggaagggggttccaggcagagggacaaatgtgggcaaaggaccagaggtgagaaatggagcgggtcttcattcaccatcagcaaacattcagtgagcacctggtcttctgtccagtcccaggctggatggtgctggggacacagtgtgactgggacagctcaggcctgcatccacaccattcacagtccagcagggaacaaacccagaaagaggagggttgtgatggggcaatcataggcagagaggtcaaagccttgatggggaagtccagaaaaggtggctgccccagcctaggaagagaaatcaaggagggcttcctggaggaagtggcatttgagcttgcacctggaggatatatagaagttaacccaaagccatgggtggtgaaggaatgacagtgtgtttcaggtagcgggaacaccctgtgcaaaggccctttgagaaaacggttaaggtgagagtgtgagggaaaggtaagaggaggtccaggggtcagcagggccatgaggagggcctcagactttgtcctgtgggccctgaagagctatcagagggacaaagtatgaatagcactgagcttttaggtacctgaaggcagaaagaggctgagctatcagccaggctagcatagggaagaaaatccccctctctctgctcagggtcaaacagaaaagggaggctggtacacaacatcccctctcttcccttgtcgcagagagcagagatctttgcttgttctcagtcttaggggaaagcatttaaccttttgccataaagtaggaagttagcggtccatgttttgtagatacgctttatcaggttaaggaagcttctttccctagtttgctgtgagttttttgttttcttgtttttgagagatgcgggtctcactatgttgcccaggctggcctcaaactcctggcctcaagcgatcctcctgccttggcctcccaaagtgctgacattacaggcatgagccactgtgcctggcctgctgtgagttattttctttcttttttttaatttttcttttgtttttttttttttaggcagagttttcgctctttcacccaggctggagcaaagtggcacaatctcggctcactgcaaccttcgccccctgggttcaagagattctcctgcctcagcctcccgagtagctgggattacaggcgcctaccaccacacccagctaatttttgtattttacacttgatcttagccaaaaggccaagaagcaataattttgtatttttagcagagatgggggtttcgccatgttggccaggctggtcttgaactcctgacctcaggtaatccacccgccttggcctctcaaactgttgcggttacaggcatgagtcaccacacctggactgttgtgaattcttatcacgaatggtgtgtctctctgtgtgtctctatctttgtgtctctctgttcttctgtttctctctgtccttattctttgtctctctttcctagtttctttctgtctcattctgtctgtgcgtttctctctccctctctctctgtcatgctttccctcacccaagggggtgtggccacgggaagctaagttgggggtggccccagtgtcctggttccggctgtggccaccgcagtaaacacaggacatcctgtgaggctagggaaggaggtggacgcttcttctcagggaccaccctctccagactcagtctgagccaagcaggagccttggcctgccctgcgtggcctagccactccgccccacccagtccagccaagggacactggtgtctccctcgatcccaccgttcacgcccacccccacaccccagtcctctctcctgagctcccggcccagggcccgggcagctccatgccttcccctgggtgtctccccagcctcttgcaccccctgggtccctccttggcctcagccccaaccccagacttgcttctctccccagttgccatctcagggatggccccagtgtctcccagtcccctgattagagccctgagcctggtctgagacccctcctccaggccttgtcagtcccacagcctgtctgctgggcctcctgagtgcctcttccctcccaacagctgctccgtccctccccagattctccacccctgggatcctgggctcctggcctccagtgtcacctccccgacgatgccacccacctagtgaagggatccttttacttcatgactccccagcatcttcagagttaagtcccccatccagggtcctatatgccctggcccctgcggacccttccagtcttgtcatttaccttactgctttcctcctccttccagccaaacccagcagcttagagatccctgaaaatgttgtagggtctctctctcagtgacccttgctgtttccttgcccaccagaacaatagttctttggggcagatactgttactgttccagtttacaggtgaggaccccgaggctcagagaagttaagtaccttgcctagagtcacacagccacagagcggtaactcttttttcttttcttttcttttcttttcttttctttcttcctttcttttctttctttcttcctttctttcttttctttcttcctttctttctttcccttccttccttttttcttctctctctttcctttctttcttccttccttcctctctctcccttccttccctccctccttccttccctcctgccttccttccttccgtccttccttctttctttctgacagggtcttgttctgtcacccaggctggagtgcagtggtgcaatcatggctcattgcagcctcaaactcctggcctcaagtgatcttctcacctcaacctcctgagtagctgggactacaggcgtgagccgtcgcatctggccaaagctggggttcaaacccaggcagtctggctttcaggaacagtctcttctctccagcttactgcttcaataatatctctgttagatttctaaagtgtgccgggactgcataccataggtgctcaataagtgttttttaattttgtttggtttggtttttttgagatggagtctcgctctgtcgccaggctggagtgcagcagcacaatctcggctcactgcaacctccgcctcccgggttcaagtgattctcctgcctcagcctcctgagtagctgggattacaggcccgccaccttgcccagataatttttgtatttttagtagaaatggggtttcaccatgttggccaggatggtctcaatctcttgaccttgtgatccacctgcctcggcctcccaaaatgctgggattacaggcgtgaaccaccatgcccggccactcaataagtgtctaatgaatagggacagaggtagaaggtgagccttggaaagtacagaattcagaccccagagaagtggggtaataagggcccaggggcaggggagagatgtggtcagatttaccctttacatagggataggcacacagtaggtgtgtgctcataaatttttgctgaatgaaggacaggaagaagggagggaggaaaaagagacaagatagctggtcacagctcttccaggtgtgagagagagagagagagtgtgtgtgtgtgtgtgtgtgtgtgtgtgtgttttgggggtggtctgtgaatgccatggaggaaagctggcctagggggcgtcatggcgagcatacacagaggctctgtgaaaggtggcagttgtgccagggctggcggctcagctaggaatggtgtgggccctggagtctgctggccaaggtggtgtggcctcctggggttgagcctgagggtggagcagcacaccagagccagggagcctgcacaacccatctgggggtgacacatggggagagaggggcaggtcctcacacatgagccattcataaacctgagggcaccgggcagacgggaccagggctgatgtagcccatatggtgcttttgtgtaaaagacatgccccttcctggaggtacttgacctccatctgctgggaaacttgtaataaatatgtaaatgcagggtacctggaacaccagtggcagccccttacatacggagcctatatgcagtgcacaacctatgcaactgtacctagaggctctggggagaggggccatcagtggcaaagcaggcacaggggcagacggaaggatcagctcaccccatattgggcctcggagacatcagaaacaggtccttagctgggcacagtggtttgtgcctatagtcccagccactctgagggctgaagccagaggatcctttgagcctaggagttcaaggctgtacagcactatgatcactcctctgtacagacagtgctctccagcctggacaacacagtgagacccaatctctttgaaaaagcggggaaaggaaagaataagaaacaggcccacgggaatcccagcactttgggaggctgaggtggaaggattgcttgagcctgggggttcgagaccagcctggacaacatagggcaacactgtctctacaaaaaatttaaaaaatcggccgggcatggtggctcacgcctgtaatcccagcactttgggaggctgaggcagggcggatcacttgatatcaggagttcaagactagcctggcgaacatggtgaaactctgtctctactaaaaatacaaaaaattagccgggcatggtggcaggcgcctgtaatcccagctactcgggaggctgaggcagaattgcttgaacccaggaggcaggggctgcagtgagccgagattgcaccattgcactccagcctgggcgacagagcgagaatccatctcaaaaaataataaataaataaataaataaaaataagaataaaaataaaatcagttgggcgtggtggcgtgcacctgtaaccccagctaattgggaggctgacgcgggaggattgctgaagcccaggaattcgaggctatagtgagctatgatcgcgccactgcactctccagcctgggcgacaaagcgagaccccgtctctaaaaaaaaaaaaaaaagaaaaagaaaagaaagaaacaggcccgcagagtgttgtaaacagagggcgttcatgatccctcgaccactggacagatgtccggggaacccaagacggcggcaccgcagagcccgactgggcaccagggggcggtgctgagctcagcccaggcgcccaagttttgagtctgcggcaaagcagtccgagtcccatttgcccggggctggagtcactcggggttggagtcaggcgcctggaagaccctcagcctggacgacagctccccgcaggccattttcacccgcttccgcggcccgcctcatccacttccagaaatgggcacaacttcctctgctcctccaggaagcgccactctgcccgccccttcccggcccctggggccgacccaggctccccatctggcccagctccactcctgcctctgcctccccgaggcttctggccagaagcgaggctctgggaccccacgatggcggcgtttccctcactcaaggccccgctggcccctcgggtcaccgtccagccccctgcgcctctctccatgcgcacccgcagttttcacggtgacactccctcccctccgtgcaccccccctcaggctccgccctgtccctgcggccgtcaggaaggacgcagcctgggtcccgtgccaggccgctgagtgtgcggcccctcccagccaggcctggaatgcggctggaccgcgggggcggccgctgacacccggcgctccagccaggcccagcacacgggcaggtggccccagctcgtccgggtctgggtttcttctagaaggaaggcacagctgcctgccctgagctccctctctgcagtccagctaccaagcctagtggctttatttcagacacagctccaagcgtccctatcctttgcccagagatttaagaccaggagtgaattttatttttaaaaatgggctgttgtccccctttcctcccccattttcctggagagccgactctcagggctccttggagaggatctgtccagggtccaggttttgtgtttttatttcgggaccattctgaaagcaatctccccttcgctcctcaataaatacaggtagactccaggcgaggacttgctttcatttttaaaaagttgccttgacttcctgctagcaaagaaaagaaataaaatttaagaaaaaaaaaaaaaggccaggcacagtggctcacgcctgtaatcccagcactttgggaggctgaggcaggcagatcacgaggtcagaagatgaagaccatcctggctaacacggtgaaaccctgtctctacaaaaaatataaaaaattagtcggtcccagctaattgggaggccgaggcaggagaatcgtttgaacctgggaggtggaggttgcagtgagccgaagtcacgccactgcactccagcctgggcgacagagtaagaatctgtcttaaaaaaaaaagaaagaaaaaaaaaaagtggcctggtaggaggatcgcttgagcccaggagtttgaggctgtagtgagccatgatcagaccactgtacttcaacctgggtgacagagcgagaccctatctcaaaaaaaaaaaaaaaaaagttcataatttaaaacccacctcaagtgataatcttggaaccttggttttctcacctgtaaaatagggatgataatactaccgatcttgtagggctgttataggattaaatgagttaacacagtgacgtgcttagaaactgtgcctcgtacacagcctacgcccaataaaatgtttgatgtttttatctcgccttcacatttgcccagagacaaagcagcacacggatttgagatttcccaggactggctttaatttgaaaaatctgattggggtctcttcccgtatcagagaaggaacagcccaagctatgaccccagggccagggaattcagtccccaccagaccctgtcattccatcactagggggtaattccaggctccccctgccagccctgagacaggaggacggatgtgaagttgcccaggactagattctgtctctccaaagtggcccaagccctgttctctgtactagggaagccagctgtgtcttttcgaggacagttggtccagccagcaggctcagttcagataccagacaaccattccagcacgagggctcagcgccctggccccggcggtcgctccagtgcctgtgtgcccaccagcacatccatgaggtagtccaattcggcctcgtccagctccggagcttcctccttgcccggcccatcctcagggcctggtttgaggccctcagaggctggtgcccaaagttcattgtcatacatagaggtgtcaatatcctcaaacaggccctcaagcccatcgtccagtagacagccagtggctgggcccagcaggtccaaggcacccaggctgggcgctgctcccccgatgctacggcctggtggcccctcgtctgccaagggttggggagcctgactcaggccctcaatgtggctgaggtcctccaggaggctggccatggaggctgaaagggcagcgtccgagcttgccagtaagttgtcagccacactgggggctgcaggtgggctaggcacaggtggcagggcagccgcgggtgccatggacgcctggatgcgccgcagagtgttcacgaccagcaccaggtgccgcaggtccggctcactctgctgcaggctgtggtggagcttgagcactgagaggtcaaagagggagctagaggccacggccgggggtgcctgtgccaccgctgtgtggccaggatctagccaccaggagtcgactgccagaggttccttctcctcctcctcctcccgtttccgcttcagacccttgctcagcatctgcagagggcagggagttatggagttatagtcagttatagaaaacaaatgttaagttcaaagcctggatctgacagttgctgcaggtaggatcttggggaagtcacttaacctctctgtgcctagcttttcttagggaactttaaagatatagacaatttttatttaactgtatatgtatatttatagattttttttgagatggagtctcgctctgttgcccaggctggagtgtaatgccgtgatctcagctcattgcaacctctgcctcacaggttcaaatgattctcgtgcctcagcctccccaaaagctaggattacaggcacatgccaccacacccggctaatttttatatttttagaagaagcatggtttcaccatgttggccaggctggtctcgacctcctggacctcaagtgatccgcccacctctgcctcacaaagtgctgggattacatgcgtgagccaccgcgcctggcctatagacttcttaaattttaaattttatatttaagtatatttatagacttttttatctgaaaaaataaagatggggtctcactatattgcccaggctggtctcaaactcctggcctgaagcgatcctcccccctcagtcaataagtacttttttttttcccttttatttttttgtagagacatggtctcactatgttgcccagggtggtctcaaactccttgcctcaagccatcctccttcctcagcctcccaaagtactgagattacaagtgtgagctgcctcaccctgccaataagtacacttaatgataacattattatttcttcagtgaaccatgtggaatggccaatattcaactttttcccctacaaaagcagctgtttcacatattttattataataacataattatatctaaataagttataatattataaatactaaactagtttcacgtagtttaatatttattgtctactatgactatgtttcaaacagtaaataaataaggaaacacaggaaatgtacagagaattacaggaagacactaaaagttcctagagaccttttagatcatcagagaaggctcctgtaaggaggtgacatttgaatggagccctcaggccagagaagtcagccatgggagaccctgggaaaagcattccgggaggagggaacaacaaaaaaaggcagagaaaagcccagaggctggatgggcttgaactggaaagagaccagcatgggtggcacacagagagtgacatggtaggagaccagattggggagcagctaggggaacgggcacaagccaggtcacagaaagccacatatgcagaagtagggagtttggattttatcctgagtgtggtgggcagtcattaaaggaatttgagcagggagggaatggtgctgtgagctgattaggtttccggaagatcccccccatggctgcttcgaggaagactgtggggggcaaaaagaggggggatctgagacccactggtaggctgtactcgtttgggacggacgatggtgatggcctggagtaggagctggtagtggcatggaaggaagtcggtcgagtcaggacttatttgggaggcagaatagacagggcttgtcgggaaatcgtgatcggcaccgggttcagtcactgagataagtttgagggtccactgttcttggagtggcgggggtagggctggagttttggactcctggcgctacctacttttttgggccaggaagactgtagagtccagtttcggaaccctgcctagcaagattttaagaatggcccaccacactactcaaaacagggtcttcgtccccttccccgcagtccggggagtccggaaccgcaggaattccgcccccacccccgactccgcccccgggtcccggcgccccctagcggtgcccaggccggctttcccccggggattctggcccctctgaccccaggaccccttctactgccccgattcccggctgtgattcctgccggcctcccggcgccgtgcgagccgggacccctggcgggctgttctctgcgcccggcctccgctcgcttccggcagtggaggcggctcctcccgaagcggcggcggcgggggcgggtgagtcacgcagccggagccaagaagccggcgcctccgcccccttctcggactgcggcgtgattcacccggcccggccggggcagacagcacgtagaggtccgtgcgtctcgatcccgggcagccccggcgggcacctgtcggacccagggatcgaactctgtgaaggacccggccgctggtagcccttctgttcccaggccccttcatttacataccttgctcactagcggccaatcagaacgaagaggtagccacccacaaccaatcaggaaacggcggcggcagcatcgcttgttggctgtcctccggaaacccgcgcctgggtcgcgagacgcagttctgactccggctcacgactccagactcctaactacccttagcgaccgcccactctcgtggctgccccgccctccgccccagggattggccctgcatggtgatgggcggagcttgtagggggcggattctgaaggaggggcttcagggcgcatgcccgggcagctgcgcgagtgaggggtggaaagaggtggctttttactccggggaacggtggcgagtgggggcttttgcctctcaaaatacgagcccctcacaactacccatgcacctgccaaacccggcaattaagcttcttacacatccagccccgacaggggtctacactacagataatgcccgggttcaaattccgactccggattccccactcactggatgcgtgaccttggaaaaatgatcaacctcttcaagctacacaaagttaaatggggatcgtcttgcctacctcttgacaggatactttaagtaggatcgtatctataagaacacaataccacactcaagcaatgctggacagttggacttaattgtggttaaaggcgggagtgaggtgggagtgcgataccaacggaatcacatcccgggctccattccctaagcagctgtgtgacctgcggcaagtgttttaatcccttctggtctgtttctcctttaaaatgagagaaaatagcgcctagtttacaggattgtttttaaggattaaattaattcatgaaaaatcttcagagtggggtgcaacatgttttgtgttttttttttttttttcattttatttatttatttatttatttatttgagacagattctcactccgtcgcccaggctggagtgcaggggcacgatctcggttcactgtaacctccgcctcccaggttcaagcaattatcctgcctcagcctcccgagtagctgggactacaggcgtgcgccaccacgcccggttaatttttgtatttttagtagagatggggtttcaccatgttagccaggcaggtctcaaactcctcacctcaggtgatccgccctcctcggcccctgagtgttgggattacaggcgtgagctaccgcgcccagctgcttattatttttttctttactttttattttattttattttgcttttgagacagggtctcgctctgtcacccaggctgaagtgcaggggtgccatctcggctcactgcagcctcccaggttcaagccatcctcctgcctcagacccccaagcagctgggactacaggcgcacaccaccatgcctggttagcaacgttgtttctttgttagtagtaatagctgttgtaataagacaagctcttagttcaaggtggatagacatgcaggatggggctagaggtagacagggtataatactcctcccatggccggatgcagtggctcacgcctgaatactctctcacctagatttaattgatagttgttagctaggcaacaactgtaatccagtactttgggaggccaaggcaggagggtcacttgagtccaggagttcacttgagtccagcctgggcaacacagtgagatctcatcactacaaaaaaatttaagaattagccaggcgtgggccgggcgtggtggctcacgcctgtaatctcagcattttgggaggccgaggtgggcagatcacgaggtcaggagttcgagaccagcctggccaacatggtaaaaccctgtctctactaaaaatacaaaaaatcagccaggtgtggtggcaggcgcctgtaatcccagctactcaggaggctgaggcaggagaatagcttgaacccaggaggcagaggttgcagtgatccaagacagcgccactgcactccagactgggcaacagagcaagactctgtctcaaaaaaaaaaaaaaaaaaggattagccaggcgtggtagcatgttcttgtggtcccagctgcttgtggggctaaggtgggaggattccttgagcccaggaggtcaaggctgcagtgagccatgttcatgccgctgcactctagtctgagtaacagaacaagaccctgtatcaaaaaaaaaaaaaaagaaaaaagtagtagttggtaacattgtgctaagttccctttatctacatatgtgtatatattgtttcttttgctaaacctttggagagtaattgcaagcatcttgatattctacccttaacagctcaggaggcatctcttaagaataaggacattaggccctgtgcgttggctcacacctgtaatcccagcactttgggaggctaaggcgagtggatcaccggaggtcaggagttcgagaccaggctaaccaatatgatgaaaccccgtctctactaataatacaaaaattagccgggcatggtggcatgtgcctgtaatcccagctactcaggaggctgagacaggagaattgcttgaacccaggaggtggaggttgcagtgagctgagattgcgtcattgcactccagcctgggcaacaagagcaaactccacctaaaaaaaaaaaagaataaggacattcatgtacaagccacaaaaatactatttcacatctaatagaatcaagaattccacaatatcacctaatcaaatctctccaactgacccaagaatatcctttatagttgctttcttttctccaaaatcaggatccaatgaaggttcacatgctaatttggttgtaatgaagaaattacatactatattttattctcgaatattcccccacccaaatcccttttttttttttttttttttttgagacagagtcttgctctgtcgcccaggctggagtgcagtggcatgatcttggctcactgcaacctccatttccgggttaaagtgattctcctgcctcagcctcccgagtagctgggattattggcgtgcgccaccacgcctggctaattttcttgtgtttttagtagagacagggtttcgccatgttggccaggctggtctcaaactcctgacctcaggtgatccacccgctttggcctcccaaagtgctgggattacaggcatgagccaccacactcagcctcaaatcctttttgatgttttgttgacattgaatttctggcaaaacagactagtcatgctgcatagtgtcccacattctggatttgtctgactgtgtttaatttgttcctctctttttccaataagctggaggttgggtctaggggcctggtgagattctgcttatgcagtgaacagggagactccacagggtgtgtcctaatccttattaatgtacttcctaatcctaacgcattatagtagttggcaccagtgtcaggatgtcccaccattggtaatgcagagtttcatcacgtgattaagattgtgagggttacatcgtaaaataaatttatcctttctagttagcaaataacctttgggatgatgctttagagcctgtgaagatcctatctccaagatgtatgtggtggctcatgcctgtaatgctggcactttgggaggccaaggcgggaacttaagcccaggaggttttgtgatttttttttttttttttttgagacggagtctcactttgtcgcccaggctggagtgcagtggcacgatctcggctcactgcaagctccgcctcctgggttcatgccattctcctgcctcagcctcctgaatagctgggactacaggtgcccgccacctcgcccggctaattttttttccttttttttttttttgtatttttagtagagacggggtttcaccatgttagccaggatggtctcaatctcctgacctcgtgatccgcccgcctttgcctcccaaagtgctgggattacaggcgtgagccaccgcacttggccagttttttttttttttttttttttttttgagatggagtcttgctctgtcgcccaggctggtgtgtaatggcgtggtcttggctcacttcaacttccgcctcccgggttcaaggattctcctgcctcagcctcctgagtagctaggatacaggtgcatgccactatgcctggctaatttttgtatgtttagtagagacagggtttcaccatgttagccaggctggcctcaaactcctgacctcaggtgatctgcccactttggcctcccaaagtgctgggattacaggcatgagccaccttggcctcccaaagtgctgggattacaggcgtgagccaccacatctggctttttttttttggggggggggatggagtctctgtcacccaggctggagtgcagtagcacaatctcagctcactgcaacctccgcctcccgcgttgaactattctcctgcctcagcctcctgggtagctgggattataggcgtgcaccaccatgcctggctaatttttgtattttcagtagagacggggtttcaacatgttggtcaggctggtatcgaactccacccacctcgccctcccaaagtgctgggattacaggcatgagccactgtgcctggccagagcccaggagtttgagactagcctgggcaacacagcaagacccaatctccacaaaatactggtttttgtttatgttttgtttgtttttgagacggagtctcgctctgtcgccaggctagagtgcagtggcactatctacagaatactgtttttaaaaacttatcctagcatggtggcatgcacctgcagtcccagcttcttgggaggttgaggtggatcacttgagcccaggagtttgaggctgcagtgagccatgattgcactagtgcacgccagcctgggtgaaagagtgagaccccaaaagatcctgttttccactaacttttcacccaactgtttgagcattcattgacaattgctgcctgaattaactaccatagttagcatttttgagaacttactttggccaggagctttattcaaaactaaaagctcttcccacagctcaggaattaacaaatgagctacttgaagaaggttaagtctcattgccagtttatgggacgagtatttttttttttttttttgagacggagtttcgctcttgttgcccaggctggagtgcaatggcacagttttggctcaccacagcctctgtctcctgggttcaagaaattgtcctgcctcagcctcccgagtagctgcgattacaggcatgcaccaccacgcctgaccaattttgtatttttagtagagacggggtttctccctgttggtcaggctggtcttgaacttctgacctcaggtgatccgcctgcctcggcctcccaaagtgctgggattacaggcataagccaccatgcccggtccacgcctggctcttaaatttttttgtagtgatgagatcttaccatgttgcccaggctgatcttgaactcctggactcaagtgaccctcttgccttggcctcacaaagtactgggattatagttgttccctgtccaacaactatcaaataaatctaggtgagatagtattcagatgctcagaatactttttttccccatcttttctatgtgcttgaatttttaataataaaattaaggtaagatgctaattagaaccaggcccccactaggcaaattcacattttctgccctccagaatccatttttatggctggcaaaagggacgcctggacctggagtctcccagtggcttactccaggtcatacactgaaggaaaaggaaattttccttcatgcttgtagtttcagctgcttcagaggctgaggtgggaggatcgcttgaacctgggagacagaggttgcagtgagccaggatcaggctgctgctgcgctgtactccatcctgggcgacagagcaagactctgtaaaaaaaaaaaaaacaaaaaacaaaaaacaaaaaacaagaacaagagctcagaggaatcatctgattaatatatatttattaagcacctactatgtggtggccactgttgtagatggtgaggatacagcactgggtaaatttcacagagtctcccctctcatggaacagggtaggaggtgaagagagaaaatatatatgaaaacgaatgcattcattgatttgcaaacatttatgtcttgagccccttttgtgtgccagacactgttataggcactgaagaaagggcagtgaaattatagatgaaaatctcttatgggagcagatgaacaataaacaaattaccttggccgggcgccgtggctcacgcctgtaatcccagcactttgggaggtcgaggcaggccgatcacttgaggtcagaagttcgagaccagcctgaccaacatggtgaaaccccatctctactaaagatacaaaagttagccgggtgtggtggcaagtacctgtactcccagctacttgggaggttgaggcaagagaattgtttgaacccgggaggcagagattgcagtgagccgagatcgtgccactgcgctccagcctgggtgacagagcaagactctgtccgaaaaaagaaaagaaaacaatctaaacaacaacaacaacaaaaattgaaaaaaagacagcaaattaaatcaatttaatttgcatttttagtagagatggggtttcgccatgttgatcaggctggtctcgaactcctgacctcaggtgatccgcccgcctcggcctcccaaagtgctgggattacaggcatgagccaccacgtctggccagtttttttttaattttttatttgtagaagcagagtatccccatgttgcccaagctggtcttgaactcctgggctcgagtgatcctcatgcctccgattcccaaagtgctgggattacaggagtgagccacctggccgccgggtctacttcttttgtttcatcaggtctctgctgaattgtcacctcttcagacataacacatcctcctccccaaagctgcacatctctcagctcactgcaacctccaatctcctgaattcaagcaattctcctacctcagcctcccgagtagctgggattacaggcgcctgccaccatgcccggctaattttttttttttttaatagagacgagggtttcatcatgttggccagactagtctcgaactcctgacctcaagtgatccacccgcctgggcctctcaaagtgttgggatcacaggcatgagccactgcacccggtctgcttttttcttttcctttgcaattacctgctcctaaggtactagataatttgtgtggtttttttgttttgttttgttttgaaagtagcccggcgtgatggcaggcgcctgtagtcccagctactcgggaggctgagacaggagaattgcttgaacccgggagacggaggttgcggtgagccgagacggtgccactgccatctcaaaaaacaaaaacaaaaacaaacaaaaaaattagccgggcgtgcctgtagttccaggtacttggaaggctgaggtaggagaatcacttgaacctggagtttgaagctgcagtgagctatgatcgccccactgtactccagcctgggcgacagagaacgactctgtctcaaaaaacaaacaaaccaaaacaaatgagagaggtaggaaaactagaggaagagcattccaggcagaggcgagagccagtgcaaaggctctgaagtgctgcctgtcaggagacaaggccagggcagctggactgggagctgccgggaaggaggtccgagaagtgaggccttttagcctactctgtggacctttgttttttactccgagcgggatgagaagaccctggaagatgaatcgatgagaaaaataatttccgtttccgttcagtgacttgaagaaaacaaaataagacgggataatcgcctgtaaccagggtggtcctagagagagattcttcgaggcgttgacattggagctggggccagaaaatggagacggagccaggaattcaaaggctgggggaagggagaagaggagaggccgggcctggggaaatgaaaccatcggcgaagccaccgggcccggcaggcctggagagaagcctccgcctgctggggagggaggcagggaggggggtcgggaggcgcggcccgccccgtccggcctctggggagggaggaggcgccaggccggctcccggccgcggccgcctcccgggtaccccggccggcccagggcggagggtgggcagcggggagggactgggccttcccgccacgcccagggcgggccgcgggcccatcccccgccgcggaggagggcaggttggggaacgtggacactgccctcggggactcggttccttctgcagggccagcctttccacttctgtggccagttctttttaacaagtgcggtgttaaggaaggcgctgggcctctcggagcctcagttttttcatctggaaagagggtgctcctcttactggcctcatcgcggtgctaaggaactgtgcgattccccttcccagggttatcttcagggcaggcagagagctgcagggaaagggggagggcggggcacggtggctcactttttaaacaaaaagtttgtttgtttgtttccagacgaagtcttgctctgtcgcccaggctggagtgcagtggcgccatctcggctcactgcaaccttcgcctcccgggttcaagcaattctcctgcctcagcctcccgagtagctgggattacaggcgcccgccaccacacccggctaattttcagtagagacggggtttcaccatgttggccaggctggtctcgaactcctaacctcgtgatccgcctgcctcggcctcccaaagtgctgggattacaggcatgatccaccgcgcctggcctgtttgtttttgagacggagtttcgctcttgtcgcccaggctggagtgcagtggccccatctcagctcactgcaatctccacctctccggttcaagcaattatcctgcctcagcctccggagtagctgggattacaggcagctgccaccttgcccagataatttttgtatttttagtagaaatggggtttcactatgttggcgaggctggtattgaattcctgacctcaagtaatccgcctgcctcagcctcccaaagtgctgggattgtaggagtgagccagggcgccctacctgtttttgtttttgaaacagggtcttgctctgtagcccaggctggagtgcagcagtgggatttcctctcactgcaacctctgcccattatgggctcaagcgatccttctacctcagcctcactagtagctgggactacaggtgagcaccaccacacccagtttttttgttttttttgtttttttggttttttttttgagtagagacaggacctcagggccttgccatgttaccccaggctggtctcaagctcctgggctcaagcaatctgactgccttggcctcccaaagtgctgggattacaggggtgagccaacgtgcctggcccttcttcaggtttttacccaaatgtcaccttgtctcagacgccctatctggccatcctatgtaaattgcaacaccctcctcactcctctgctcccccctgcccccacagcatttatcaccacctggctgacttacacattttcacttctttttttttttttttttttgagacagagtcttgctctgtcacccaggctggagtgcagtggtgtgatctcggctcactgcaacctccgcctcccgggttcaagtgattctcctgcctcagcctcctgagtagctgggactacaagtgtgcatcacaatacccagctaatttttgtatttttagtagagatggggttttaccatgttggccaggctggtctcgaactcctgacctcaaattatccacccaccttggcctcccaaagtgttgggattacaggcgtgagcccccacacccggccttatttttctttttatttacttaattatttttgagacataattttactctggttgcccaggctggagtgcagtggcctgatctcagttcactgcaaccttcacctctcaggttcaagcgattctcctgcctcagcctctggagtagctgggattacaggcgccggccaccatgcccagctaatttttttgtatttttggtagagagggggtttcactgtgttggccagtctgctcttgaactcctgacctcaggtggtccactcgccttggcctcccaaagtgctgggattgcaggtgtgagccacagcgcccggccctatctaactaactatctatctatctatctatctatctatctatctatctatctatttggagtgggagtctcactctgtcgcttaggctggagtgcagtgctgtgatcacagctcactgtaacctccaactcctgggctgaagaagggatcctcccacccgagtcttctgaatagctgggactagcgtgcccagctaatttttttttaaaattgttttagagatgtggtcttgctatgttgcccaaagtggtcttgaattcttggcctccaataatcctcctgcctcagcctcctgagttactgggctcatagtcacgtgctgccatgcctggcattatttttcatgtgtatttcactcttcccccactgttaaatttcatgagagcaggaattgtctattttatttattttcctgctgaagagtgccaggtccacagcaggcactcaataaatctgagccattattggaatccttggcctgcctcaggctccctgacactttgcagtgtgaggcaggtattactccagatccttcagtttggaatatggtgtatatgaggaacagcagggaatggtgtggtgggagtataagagtgagggtgtgtaggggagatgagttcagaaaggtgggagggaaagttagtcattgctaggtctggagttcatttttttttttttttttttgagacggagtcttgctctgtcacccaggctggagtgcagtggtgcaatctcggctcactgcaagctccgcctcccaggttcacgccattctcctgcctcagcctcccgagtagctgggactacaggtgcccgccacctcgcccggctaatttttttgtatttttagtagagacggggtttcaccgtgttagccaggatggtctcaatctcctgacctcgtgatctgcccgcctcggcctcccaaagtgctggaattacaggtgtgagccaccgcacccggcctttttttttttttttttttttttttgagacaggacctccctctgttgctctgttccagatggagtgctggagtgcagtggtgttatctctgctcacagcctccatttcctgagctcgagcgatcctcccacctcagcctcctgagtaggtgggactacaagggcatgccatcagcccagctaattttattttagttttttgtagagatggggtctccctgtgttgcccaggctggtcttgaactggacacaagcgatcttcctgcctcagcctcccaaaatgctgggattacaggcgtgaaccactgcacctggccaagtttttcaacaacaaataattttttttttttttgagatggagtttcgctcttgttgcccaggctggagtgcaatggcacgatctcagctcaccacaacctccgcctcctgggttcaagtgattctcctgcctcagcctcctgagtagctgggattatagccatgtgccactacgcctggctaattttgtatttttagtagagacagggtttttccatggtggtcaggctggtttcgaactcctagcctcaggtgatccgaccgccttggcctcccaaagtgctgggattataggcgtgagctaccgtgcctgacccttcaacaacaaataattttggagagtgcagttgtgccaagcatagttctaggcacagaccaacacaaccctcagagttcccaggagagtaggaggctacctatagatgggaaataagtaactcgagattgggtagatgctactaaaacaaaatcagtccaggtgcagtggctcatgcctgtaatcccagcactttgggaggccgaggcgggcggatcacctgaggtcaggagttcaagaccagcctgaccaatatggagaaacgttgtctctactgaaaatacaaaatcagctgggtgtggtggcgcatgcctgtaatcccagctgttcgagaggctgaggcaggagaatcacttgaacccaggaggcggaggttgtggtgagccaagatcgcgtcattgcactccagcctgggcaacaagagtaaaactccgtgtcaaaaaaaaaaaaaaaaaattagccaggtgtggtggcatgtgcctgtaatcccagctactcggaaggctaaggtagaagaattgctggaactgggaggtagaggctgcagtgagccaagatcatgccactacactccattctaggagacagagcaagactccatctcaaaaaaaaagaaagaaagaaaatcaaacaagttgtggtggggtggtgacccacctggatgtgttgagctaggaagggcaaggaagacctccctgagaaggggatattgggattggtgaagctattggggaaaatgtccactgggaaaatttaacagttagggcaaaggccctggggtgagaaggagctggggtcaagggagcccagttgagtgatggagagagtgggagatggaactgagaaagttgtccgaagtgagaataagtcagtccttgcaggtcttggtggagctggcgctttattgagtgtgtcaagaagtcactggaggctgggcgtggtggctcatgcctgtaatcccagcactttgggaggctgagatgtgaggatcgcttgattccaggagttcaagaccagcctgggctacatggcacaaccccatctctacaaaaaatacaaaaattagtcaggtgtggtccacgtgcctgtagtcccagctacttgggaggctgaggctgaggtgggagaattgcttgagtccatgaggtggaggttgcagtaagctgtgattgtaccactgcactccagcctgggcgacagagccagagaccctgtctcaaaagaaaaaaaaaaaaaaaaaggcactgaaggtttcaaggaggaagacatgattcaattgccatcatattgggatgcagacctggttgcttaccttttatttttattttttacaattccacagcaagtatcacacctggttgcttttttttttttttttttgagatggaatctcgctctgtcactcaggctggagtgcagtggtatgatctcagctcactgcaacctgtgcctcctggattcaagtgattctcctgcctcagcctcctgagtagctgggaccacaggtgtttgccaccatgcccagctaattttttgtatttttagtagagacagggcttcgccatgttggccaggctggtctcaaactcctcacttcaggcaatcctcccgccttggcctccctaagtactggaattacaggcctgagccaccgcgcctggcctgtacctggttgctttctttagatcctctgggccacctcattcctctctctggattggcacccacctcttcaggttatccctccactttctgacaatgaccccttcaggttgagaaatctggctttgacccagaaaccacaagcaaaatccccatcctttctccacccatggactatactcaggtgttgttcctcctcgcagcccttccagaaaagtccctaatgctgtgtagctcacttgcttcatctcttcaaagaccattgtaaaggcatagcctgtacaggtatcacattacctcttccttcacttccttcacctccttctcctctcctgtatctcagcagcctgggctcgtacctccgaaataaagcatcagcacaggtcaggcacagtggctcatgcctgtaatcccagcactttgggaggctgaggcaggcgggtcacttgaggttaggagttggagacaagcctggccaacatggtgaaactgtctctattttaaaaaaaatacaaaaattagctgggcgtggtggcaagcacctgtagtcactgctattcgggaggctgaggcaggagaattgcctgaacccgggagtggaggttgcagtgagccaaaatcctgtcattgcactccagcctgggtgacagagtgagactccgtctcaaaaaaaaaaaaaaaaaaaaagcattagcactataaatctaatctgggctctgcttcctagccaactctcctaaagaggtcttttagtactgggggtctttgggcattttcttgcccctctgggctcagcagcacattcagtgacacatactccgtgtgactcagtttctccctcctgtgcccacccacgtggctggttagtctaagaagcaacatttataatagtgaaggacaaggctctggaggccatttcagcctagctccctggtccttgttcttcctagctgtgtggctctgaattaagtgacttgtcctctctaaacttctggttcctcctgtataaaaagtggtaacagtacttacttctatatgaggattaacagacttaattcaaataaagtggctagaacagtgctcttaacaagcactaatttttttctgaggctggagtgcagtggtgtgaccatggcttactgcagcctcaacctcccaggctcaggtgatcctcccaactcagcctccccagtaactgggactacaggccgccatgcctagctcctttttgtattttttgtagaggcagtgtttcgccacatttcccaggctggcctcaagcagatcctcccaaagtgctaggattccaagtgggagctagagcactcagccaacaagcactcaataaatgtcatgtacaatgatacacctaccccagctatggcacggaagtggtgctgatgtttaggaacttaccaggtccctcccactgacccagtgaagtttagaaacattagacaacatccctccttccaaaatacttttatttaaaaaaattacaaacaatccaaaaaaaaaaaaaaaagccaccacaaactctgcctttcttttaaataacccggcatggagcagtttggtttccaccctattgcacgtggtccggcctggttatgaaatcaggaggctgctgagactggggtcctgccgaggaagtggggttcagcctggagggaggacaccagcccctcccaccccctcaaggtgcaagaggcagagcctgggtttctatagcaacctggcagcacatccctgtcatccttcgacaggcccagctttctttatcttccctgaggccccagtggtcacaggggagtgggaactagcaggaaaggtggaagaaatgtgtaagtggaaaatcagactcccagaaacagagtctcgttaaggcatttggaatagataaattaattcaggaagacccaccttcacagaaggtcggggtaaccagacacacacacacatgcaagacagtttgtggaaccctgaaatgggaacaaaggaggccatagtcactgcttcgagcccccacaaaaacacacacccagagttgcattcagggatccaggccaccgaagatgacatgaggaaggatcgatcccctctatcacagttttaggaccccagaatgatttccatgatgtgatccagttcattccactcccaagaacctggggcacagaagaggttgtgaggaggctctggtggggcccgtgcaggctccttttctaccgcagatgtgtcaatgtccagaaagaagtcatccaggccagagtcccccaagtaccgggagctcagagcttctaagaagactggatcaggctggggtggcacttcattctggaggccaaggggagtcactggattctgagggggctcagtcccatccatggaggtgtccagctccctgaggatagagccaatggtggctgacagggagaaatcctcctcgcccaggaagaggggctcggggggcagggcaggggcgggagccaggcgaagtgcagcctgcagctgttggagggtgttatggatgaggacatgcctgcggaggctgggtgctcgggggcccaggctgcgctggactttgtctagggagatgcggagcagggcttgctggtagctctgaaggcctgctggactccactcccacctctcctcctcctcttccaaatcagagtgtttcctcttcaagcctcccaccatgatgccctgtagagagaagaggcgcataggggaaggtcagacaccagacaccgtagtgctggctcatatcccactttctcaggcctattgagttgttagtgatttttaatcatcggaatctcagtttactgatgtataaaatgaaggctgtctgaatcctacaagtttaagaaggtgagtacatatacgattaagaaaataagatctggcgttacgtacagctagatttaaatctcacttacttgcctgttgtggcctcaaacagtgaatttacatccatgagaatcaatttcctcatctgccaagtacggatcctaactcaagttcctctaagccttaaaactgttcttccacaatattaatttcttcaaacatggagcacgaaagacaagtgtggagcacagagacctggattggaagtagggaaccccaaatctgaattctgtattggaaactgctcagctgcgtgatcatgggaagtgatctgaatgagtcaattctcagggcctcagtttcctcatctgtaaaatagggactgtaaaaaaatacttctcaccacctctgtcaaggagatgccacgtatctatagggcccaccacaccggaagtgcttaatgaacaagagttgtgtttgttttttgttagagacagggtctcgctctgtcgcccagggctgagtgcagcagcgctatcacagctcactgcagtctcgaagtcctgggctcaagcgatcctcccgcctcagcttcctgagtagctgggattaccaccacacccggcctcgatcaagagttaattgccagttattcgctcaacagatttactgagtgcctactatattcgaaatctcctggagccctgttggggaacctatgttgagattcttcttcaacagtcgggatatttctatgtcctcttccttaaccgactgggagcgctcccaagagtaggaaaggggcctgtctcattccctctgcccacgctttcagattcccccaaagcgcgccccataggaaaacttgctagaactcagctcagaccaagccccgccccctcggaggtcccactcaatcagaccgcgacactgtaaggccccgcccccccatgggtccttacagagcatccaggaacgccccaatttggcccaggggcttctgggaaacgggggccaacagccgccaggtacacgaattgacgtcgagcacgcactacaatccccagagggctccgcccgtccaggggacgagccacccccctcaccccgctctccctcagggcatgcgcacaggggcacaggcgggtgggggaagggaacctggacgtccagctgccggcgcctgccgagccccgccctccattgcctccggggccgcgagtctgagctccaggcccggaacacccctcccccaccccagactccggctctaaatttgctttctcccggtccctctgttccttgaaagtccgcgattctccttccaaactgcccttggatccagagacccagatccgaacacatcgctcaaagacgacaatgctccgatctagttcgggagactacgtatcctaattctgatacttcctcccacttctcctagtctcctgactttcaaacgcccctggacttcacctccaaactcgctgtccggctccaagacccgaacattgaactcttcccggcaacctccttcccccgccagtgcgtcttggagtcccaagaatccttgaccctagttctctcgcttctccaaatactcagaatctcagctccgtacctctcacaccttttccagaacacgataaagccccgaattcaacccgtccggaagacccaagtggaatcgaatctccaggttccctgtctcaaaagttcctcccctctgttctctcgcttctccaaaagcccaacgtcccagcttcaaactccctccacttgaaaatactgccccaacaacctcgcctcccctcctgggtcttgaactcagtctcaggtccccagaccctccctatcatcaccctgaatctgaggccccctcccccggtcccacccagaccccgcctccgcaagtccccggggcgcgcttctctctcccccagcctaaggtaaattcccaagccaggcgaccactcctcaccgcagctgccaggttcgccacgaccacctcctggaacgcccacagcgttgcgacccgccagtgccaggacccaccagtgaccggttggagcctcgctcacctcggcggggcctctccgtctggcctctggcccaccagccccgccccggagccgagccgcgagccgcgattggctggagtcccgcccgccgcggggcgtcgattggctgggcggagccatccgcccgtgccccgagacgccggatccgcccacccctccctagcgccccgggccatttaaagaagtgcaactggcagggggcggggcagcgactccggggtggagggcggccggtccaacagaaccgcttccttccactcagctacagtcctcgctccaagatcgtcaccattgctccctgcggttcctttatggtaggcctggactccaccgtggagccagaggggctggcatgcccctccccaagtcgctgtgcaggcgggcggggccgagcaaccggaggaggccgcgcccccggggttccgagggaggacgctggggcgcgggggatgacgtagcggaagaccagccaatagagtggcgcggcccgcgttgcctaggcgatcgtagcctcgcccccttgctgcccctcccgccccctatacgttaccgcgcggccccttcttaatcctcaggttttctcagcacgtcctctggtggtcccacctgggtcttctgacaccctctttccttccccgctccatcaagatgactcctctgctactgttcatggcttcctacccaccccgaatacaaacttcaaactccttccttttgccacaaagcccctcacgaccttgcttgatgcgttctcctggttctctccgatcctgccccattgagtcacttccagtttttctaaaatggcttcaagctcccattcaccccatcaggaaaacgaaaggattttctctgtttgttttcttccctgctttaccccagtgtctacaacaatgccaggtacataataagttcgcaaacatgacaataaaaggcctctggatctttattattaatattattttttgccgggcgcagtggcgcacgcctgtaatcccagcactttgggaggcggaggcgggcagatcacttgaggtcaggagtttgagaccagcctggccaacaatggtgaaaccccgtctctactaaaaatacaaaaattagctgggcgtggtggcgcacgcttgtaatctcagccacttgggaggctgaggcaggagaatcgcttgaacctgggaggttgaggttgcagtgaaggcgagatcgtgccactgcactccagcctgggtgacagagagatgggggaggggggaggggggttttcttgtgttgcccaggttggttttgaactcctggcctcaagcaatcttctcgcctctggatatttaaacttgtttcctcatcctcaaaatataccctcaattcccaggctgcttctcagaacacatttcaaaggtttcctcctctccgaagccctccctggcagtccaggttgggttaggatccattctaggattccatggcctcctgtgccgccatcccagtcctggactgtcagttactatatggactgaggaacgccccgccgagggcaggtaccaaggatatctctgtcaaccacctcttggtctgcaggatcacctagcacagggctggacacgtagcaggtcccagtgaaagtttgctaaatgctcaggaatgtgacagaaaaataaggcagaaagaagacactgctagtgtcctgaaagcccacacccgtaatgctccgcccctacaacgagtttccctaaggggaggaggcagttttctccaggccacctctgggaagggaggtttaagcctcctcagaccagttcttgccggttggagtttgtcaaccaagtcatcctgatgtttgcaggataaatgggaggggaataggtaggtgggtggtgtgggttggaggtagggagagagaagtgtcttagctcacccaggcctagggaaggtgtccctgggaaaaaaagaaagggacagtaggttccaaaaaaggacataattaggaaggagcaattcttccccttcctcctccaaaacctgcgcctcctatagggtccacaactcaggaaagccctactgcatttgggtttttgtttttgagacggggtcccactccgtcgtggatgctggagtgcagtggcgcaccttggctcactgcagcctcagcctccctcctgaagcactagtgtaactctgtccccgggttacagccgtatgcttctttctgatgcctcccctccacccctcaccaactgtccacgcaggctcccaggcattcctcacacccactctctcctcccctccttacagttcctcctccaactccctctgggctatcagcctccattcctggacccttcctttccaccttcacagagtagccaaaggaagcttcataaaacacccaactgtcccccctgccttacttctctggtgctccactccttgcataaatcctcaaaataaagcacaaacttttttttattttcagagacagggtctggatctgtcctacaggctggagtgcagtggccaggccttgacctcctggcctcaagccattctcccgcctcagcctcctgagtatctgggactacaggtacacaccaccatgcccagctaagtttttaaaaattattttgtagagatggggtctcactatgttgcccaacctggactcctggcttcaagccatcctcccacctcagcttcctgagtatctgggactataggtgcacaccaccatgcccagctaagttattattattattattattgagatggagtctcgctctgtcacccaggctggagtgcagtggcacaatctcggatcactgcaacctccacctcccaggttcaagcgattctcctgcctcagcctcctaagtagctgggattacaagtgtgcatcaccacgcctgggtaatttttgtatttttagtagagacagggtttcaccatgttcgccaggctggtcttgaactcctgacctcaagtgatctacccgcctcggcctcccaatgtgctgggattccaagcatgagccaccatgcctggccagactcaataaactgttactgggcggggcgcagtggctcacgcctgtaatcccagcactttgggaggcgaggcaggcggatcatgaggtcaggagatcaagaccatcctggctaacacggtgaaaccctgtctctactaaaaatacaaaaaaattagctgggtgtggtagtgggcgcctgtagtcccagctactggggaggctgaggcaggagaatggtgtgaacctgggaggtggagcttgcagtgagccagattgcgccactgcactccagcctgggcgacagagcaagactcggtctcaaaaaaataaaaaaataaaaataaactgttactgaacaaatgaatgaatgcataacaagcaaatcttacacagaggcaggcagacacaccaaaatactcagacagaggcagagagaggaagagtcacacagtcggtttctctagagtaatttgaagctcttggctcaacatttattgcccccttcctttgctcctcatgtcccagaatgccaccctcccagatggggacagagtgctactggtactggtgggaggggtaggtgctgtgtccgtcgtactcatcggtggtgaggcagcgcagcatgaaatggcccaggtcatgtttggagatgacccttgagggccctcgtccatccagggtcactgtgtacgccccagttagtggctggtctcctatgaagtaaagacaagaggggctggataaagcagacacctttcccttcccccaaaattcgacccccagaaagaccttcccagggtgcctactgtgtgtccagcctgggtggtgtcacagccaagaatggactttccatatgcaggtgctcatctatatcctttgcttcattcattcgataaatccttattgattacctattgtgtggccaggtgctgggcacccaagcaagggacaaagcagacaggaatcccctgccctggccagtggcggtggctcatgcctgtaatcctggcactttgggaggctgagacaggagtatcactcaagcccaggagtttgaaactatcctgggcaacacagggagaccctgagtccactaaaaatacaaaaatcagccgggtgcagtggcatgcccctgtagtcccaactactcaggaggctgaggctggagaattgcttgagccagggaagttgaagctacagtgagccatgatcgtgacactgcactccagccgggacgacagagcaagaccttgtctctaacaacaacaacaacaaatatatatatatatatatatatatatatatatatatttgtcagatagatatatatctgtctatctgacagtaaccaactaaacttagggatacaatgtaccatcacccaaacagagacaggctggaattatgcacagtatggaacacacacccttggctgtgtgtttgcttgggacaaagcagacaggaagctcctgccctggctgggcacagtggctcacgcctgtaatctcagcacttcgggaggccaaggtgggaggatcacttgagctcaggagtttgagaccagccaacatggcaaaaccacatctctacaaaaaatgcaaaaattcgctgagtgtggtggcttatgcctgtagtcccagctacttgggcaggagaatcacttgagcccagaaggcggaggttgcagtgagccaagattgtgccattgcgctccagcctgggctacagagggagaccctgtctcaaaaaaaaaaaaggaacacacaccttcacccatgtggcattcctgcccaacatgtttaatctgaatctgtgacaaaacagctagaaaaatccagaatgtgggcctttaaagtcacctggcctggttaatgttatgagaaacttaaagaaaaagggcagagtgggttgaatttttttttttcttttttggatagagtcttgctctgtcacccaggctggagtacagtggtgcaatcttggctcactgcaacctccacctcccaggttcaagcaattcttgtgcctcagcctcccgagtatctgggattacaggtgtccgccaccacacctggctaatttttgtatttttagtagagacggggtctcaccacgttggccaggctggttttgaactcctgacctcaagagatccacccgcctcagcctcccaaagtgctgggattacagatgtgagccaccacgctggcctgacagttggggaaattttactacggagtggatactaaatgatatgacagagtaaatgtcactttccttaggtgtgagcatgttttgtgtgcaaatatctttcttttaggagatggctgtctaggtatttaggagttaagtgcgacaatgttgcaattcctctcaaatgattaagccaaatatacatatgcatatatgttttcacaatatattcagcaaaatctaactatatattcatggagagagagagaggaggagagagggagagacaacaggataaaatgctaagcattgaacctaaacaaagggcttatgtgtattcataaacctttaatgctttcaaatcgggaggtgtggaagttttcacacacttggctgggcgtggtggctcacgcctgtaatcccagcactttgggaggccaaggtgggcagatcacgaggtcaagagatcgagaccatcttggccaatatggtgaaaccccgtctctactaaaaatacaaaaattagctgggcgtggtggcacgcgcctgtagtcccagctattcggggggctgaggcaggagaatcacttgaacccaggaggcaaaaggttgcagtgagccaagatcgcaccactgtactccagcctggcggcagagcaagactctgtctcaaaaaaaaaaaaaaaaaaaaaaaaaaagccaggcgcagtggctcacgcctgtaatcccagcactttgggaggccgaggcgggcggatcacaaggtcaggagattgagaccatcctggctaacactgtgaaaccccgtctgtattaaaaaatacaaaaaattagccaggtgtggtggcgggcgcctgtagtcccagctactcgggaggctgggcaggagaatggggtttcaccatgttagccaggatggtctcgatctcctgaccttgtgatctgcccgcctcggcctctcaaagtgctgggattacaggcgtgagccaccgcacccggccattaatatctatcttttcttgtctttttctttttttttttagacagggtctcactctattacccaggctggagtacagcagcctgggcaacagtttattgcagccttgatctcctgggctcaagccatcctcccgcctcccagtagctgggaccacaggtgtgtgccacgacgcccagctaatttttttttttttttgtagagataagtctatgttgcccaggctggtctcaaactcctgggctgaagaaatcctcccgtcttggcttcccaaagtgatgagattacaggtgtgaaccaccatgcctggcctatgtatctatctatctatctatctatctatctatctatctatctatctatctaatctctatctcccatactagaaatgtaagccatggcggggcatggtgatgcaggcctgtaatcccagctactcaggaggctgaagccccagaatccatagacataatggattaaaccattagccagtggtaatcccctcaaccttcaatccctcaccactccccagaggtgaaagtcccaaccctgtaatccagccttagtctttctggtgaccagacctgaagctgcctaggggctgccagctctcagtgaactcattagcatagaaaaagacatttaccattttggagattccaaggattttaggagttgtatgccaggaaacagggacaaaggccaaatatatatgtcacaatatcataggaaggtttgcaattttagggtggtcagggaaggccttgcagatctccccagagggcaggagggaacaggcagatggcattggtgccaccaggtccctgccctgcttacctatgtgtggcggcatcacagccacgtacttcaggcctgattcccgcagcaccttgtgcatccggatgtggtcatcagtcacagcctgcagtcgtgggggcaccttggtagggtcccagagcaggaaagctggagggaacacagggcaggatcagcctgggctctcttgtctttttttttttttttttgagacagagtgtcgctttgtcacccaggctgagtgcagtggcgcaatctcggctcactgcaacctctgcctcccgggttcaagcaattctcctgcctcagcctccccagtagctgggattacaggtgcacaccaccaggcctgactaatttttgtatttttagtacagacagggttttgccatgttggccaggctggtctcaaactcctgacctcaggtgatccaccctcctccacctcccaaagtgctggaattacaggcatgagccattgtgcccagccaagggctcgcttgtcttgatgccaggacaaaaccctgccatggctgaccattgctttccagttgcaaaaacaggggagtcctctggggctcctctttccctcacaccccaggtaagagctgtctgctgatcacaataattccaaatctgacctcttctcactccgcctggtcctgtccactgttacctcttgcctggaccagcccagcagcctactccctggtctctcagcccctccttccctcctcccaaggagcccgtgaacacccctatcagttcacatccatagctccatctcactcagggtagaagcaaagtccccatggccagccctcaaggccccacctgatatggccccatcagccctctgacgtccttgcctactctgcctaccactctctcttacacgcctctgctccagccaggttctgcctcccagccttggcaatgtctgattcctctgcccctgatgcatttccctctcttttttattttctctgagacagggtctcattctgttgtccaggctggaggacagtggcgtgaacacggctcactgcagccttgactttctgggctgaagtgatcctcctgccttagcctcctgaggagctgggaccacaggggtgagccaccaaaccccactatttttttttttttttgagacagagtttccttccctcttgccacccaggctgcagtgcaatggcatgataccggccaagcctggctaatttaaaaaatttttttaggccgggtctggtggctaacccctgtaatcccagcactttgggagactgaggaggccagatcgcctgaggttaggagttcgagaccagcctggccaacatggtgaaaccccatctctagtaaaaatacaaaagttagctgggcatggtggtgcatgcctgtagtcctagctactcaggaggctgaagctggagaattgctggaacccttgaggcggaggttgcagtgagctgagatcgcgccacggcactccagcttgggagacagagcaagactccatctcaaaaacaaagcagaacaaaacaaaacaaaacaaaaaaaacacaaaaattagccaggtgtcgtggtgcatgcctgtaatcccagctattctcaggaagctgaggcaggagaatcccttgaacctgggaggcagaggttgcagtgagccgagatcgtgccattgcactccagcctgggtgacagagcaagactccgtctcaaaagaaaaagaaaaaaacattttttttgtagcgatggaggtcttaccaagttgcccaggctagttttgaactcccgggcttaagcgatccttccatctcgacctcctaaaatgctgcgattacaggtgtgacccaggaccctttgccatttccctctcgtagccacatggctccctgttttctttgcagactttgctcaaaggtcacctttccatgcagcttttcttgactgtcctgtttaaaattgcaaaatcctgtctcccccagcccagtttaccaatcccttttcttggggccttgttttctccctaggacccttcccctgccaccacacgctagagttatcctgtgactctatcacatttcctgctccaatcccagcccttagaagcatctggaacattgtaggtacttactaaatatttgttcaggaattagctttcaacaagctataacttggccaagctacaccagctgacatttatagaacttttacctcaagccaagaactatgctaaatatttttaggagcagtttggtgaatagttaaagagcttgggttttgcctaaagtcaagtactggatcgaccactggccagcttcttgtttcctcatgtgcaaactgggatgatataaattgttcaaaggctgggcagagtggctcacacctgtaatcccagcactttgggaggctgaggtaggaggatcagttgagcccagcagttctagactcacctgggtacgatggtgagacctgtctctacagaaaattaaaaaattagccaggcgtggggacctgtggtcttagctgcttagaaggctgaggcgagaggatcgcttgagctcaggagttcgaggctgcagtgagctgtgattgcaccgctgcactccagcctggacaacagagcaagaccttgtctcaacaaaaagaaataaataaatagtttgagtaatgttagtggttataaaaaggtgtgtcacagagaccagcctgggcaacaaagccagactctgtcgcaacaaaaaaattttaaaaattagatgggcatggtggcacatgcctgtggtctcagctactcaggaggatcccttgagcctaggagttggaggcggtagcgagctatgatgacatcattctcactgcaacctccacctacaagtttcaagtgattctcctgcctaagcctcctgagtagctgggattacaggcgtgtgccaccacacctggctagtttttgtatttttggtagagacggggtttcaccatgttggccaggctggtctcgaactcctgacctcaagcgatccacctgccttagcctcctaaagtgctgggattacagcgtgagccactgcgcctggtctaggatttcctctttacagatgagaaaactgcggtgcagagtgtgaagtgggtttttgtctgcagcctccagtctccagttcacaatctcaaatccagtctctaacttacccctagtttcttttttctttttttttttgaggcagtctcgctctgtcacccaggctggagtgcagtggcacgatctcagctcactgcaagctcctcctcccgggtttacgccattctcctgcctcagcctcccgagtagctgggactataggcacccgccgccacgcctggctaattttttgtatttttagtagagacggtgtttcactgtgttagccaggatggtctcaatctcctgacctcgtgatccacccaccttggcctcccaaagtgctgggattacaggcgtgagccacagcacccggctgttttgttgtgttttgagacagggtcttgctctgcagccaaggctggagtgcagtggtgccatcacggctcactgcaacctctgccttctaggctcaaaggatcctcctacctaagcttcccaagtattggggaccacaggtgtgtaccaccacacccagctaattttttgtattttttttttgtagagatggagttttgctgtgttgcccagactggtcctgcactcctggacgcaagcaatccgcccaccttggcctctcaaagtgctaggattacaggcgtgagccactgtgcctggccttactctgggtttctttctaatcctctcagatgcctccataaaaaacaatcctccccaagccctaatggataaactccaagctccttagatgacaaaaatctttctaatcttttaccttgacatttgaatatggagggaagattaaactctaataattagaggctggaagataattaaagtgtgacaatagcactgtggtgctggaagagaaaagtcctttttcttgggacttgccgaaggtgtctgtgggtgtgcaactccatttcaaatagtttaggaagtctgggcgcagtggctcatgcctgtaatccagcactttgggaggccagatcacttgaggtcagaccagcctgcccaatatggtgaaaccccatctatactaaaaatacacacacacaaaattaaccagatgtggtggcaggcacctgtaatcccagctactcaggaggctgaggcaggagaatcccttgaacccaggaggtggatgttgcagtgagccaagatcacgccactgtattccggcctgggtgacagaatgagactctgtctcaaataaaaacaaacaaacaaaaaacccaaatagtttaggagaacaaaaacaaaatctatttgtgtatgtgtatgtgcatagataaaccaattacaaaacacaatcacaattttaaaatcaggaatatggctgttggccaggtgcagtggctcaggtgtaatcccagcactttgggaggctgaggctggtggatcgcttgagtccgggagttcgggaccagcctgggcaacatggcgaaactctatctctaccaaaaatacaaaaattagccagccttataacccggtctcaaaataaataaataaatagatagatagctacaaacttaaaaataaaaaaagaaaaggaatatggttgttcacacgactattaacttttctgtttaaaaatttttataataaaaagttaaaaagtatattgaggacctacacattgaagtaagcagccatgatgtatgtaagctaacttcaaatgggtcagaaaaaaaacattgtgtgtctgtgaacagaggacggtaggtgtactggtgtcctttcaatttttctgtaagtttaagatcatttccagataaaaagttaagctggactcaatggctcatacctgttgccccagctatttgaggggctaaagtgaggggattccttgagcccaggggttcaagggtacaatgagctatgatcaggccactgcactccagcctgggtgacagagcgagaccttgtctctatgtttgttttttttttaatgaaaaaaaaaatcctggcacacctaagactttaatatttagaaaacaatctaaacaaaaaaaaatgagaaaaaagaaagcaaattaaatcaattttacaggtttgtctttttcatggaagcaaaacttaaccagttaaattggtttttaagacatgggagagtctggacgtggtggcttatacctgtaatctcagcactttggaaggctgaggtgggaggactgcttgaggccaggagttcaacatcagcctggccaacatggcaaaaccttgtctctaccaaaaatacaaaaattagcagggcatggtggcaggcgccggtaatcccagctactcaggaggctggggcaggagaatcactgtgggccacgatcttggtcccaggcaccatgaacccgggaggtggagtggcggttgcagtgagctgataccacgccactgcactccagcctgggcaatggagtcagacttcatctcaaagaaaaaaagacatgggagaaaaaaacaaaactaaaattaacagcagaccattccaatctgcgaacaaaagtaagaccttgtctctacaaaaatatcaaaaaattagccaggtgtggtggtgcatgcctgtagtcccagccgcttgggaggctgcagtggggaggatcacttgaacccagactgaggctgcagtgagccatggttgcaccactgcactccagcctgggtgacagaaagtctcaaaaaaaaaaaaaaaaagtgaaccattctgaaatcgcaagtttactcgtgtattacttttccatttcagagcttgaggaaaaaagccataaatgattttgcttcctaccctccaactaggtctggcctccaggcctctttgcttgctttgtcctctgcctggagtgtaattacaatcatcaggcagccctccctcatgccacttccctttccagggaggcaatttgtgtcatgaaacacacttgaggtcaggagttcgagactagcctggccaacatggcgaaaccctgtctctactaaaaatacaaaaattagctgggcatggtggtgcacacctgtagtcccagctacctgggaggcagaggcaggagaatcacttgaggcaggagaaccacctccgggaggcggaggttgcagggagccaagatcacgccactgcactccagcctgggcatcagagcaagactctatctcaaacaaacctcaaaataactataaataaataaataaataaataaatgattatacagggcaactatttgcttaatgtctgtgtccccataatcgggagctctgtgagggcagagacctagtgtctatccacagctctatcacttcctctgggaggcctaccctgacctctctcagcctaagtcggacgcctcctctgggctcccatagtcctgtagtttctcccattgtggccctatcccctctgcctgcctcccgatcccagctccgatgatctggatgtcagtttgatcatggatctgtttaccacctctctctgtgagccttgtgtgagcagggcccagggctgtacaggtcaccactgtgtccccagcatcacccagtaaggttcaggcacacagctggtgttcagtaaatgcacagtaacatggaatggcttcagcgtcacctttcagaggcccctgggctgcctccccagtaccccccagttcagccccacctccatgatcccaccacccacccgaggtgcaggccacgaccttgtccacaccatgagccttcatggctgccacaatgttccgggcgccctcggacatcactgtcgtgggaccttagaggggacagagagtggctgtcactggtgggcggcggcggcggcaggggtggcaggggcggggccgggggcgggggtggcgctgggggccgaggtgtaggggagggccgtgggcagagggggggctcagtactgaggtcattgcgggtgcccagcagcacgatgacagcgtcctgcccagccacggtcttgtccacatcggctgcctgcagaacatctcccactaccacgtgggccggccggggcccctctgatggcagcctggaggagtcccgcaccagcactgtcacttcgtaacctgtgggcaaagaggagcagagagcctggtcagtgggctggcactcttgggctccaggagctgggtcctagaagccaccatgaactctcaaatccatcccctcctctgttctggggaagtggtcttcaaacatttttggttttttctttttgtttgttttgtttttgagacagggtcttgctcacttgcccaggctgctgtgcaatggtgcagtcacagctcactgcagcctcaacctccggggttcaactgatcctcccatctcagcaccccaagtagctgggaccacagtgtgcaccaccacacccagctaattttgcaatcttttgtagagaaggggttttgccatgttgcccaggctggtcttgaactcctgggctcaggtgatctgcctgcctcagcctccccatgagccactgcgccgtggccttcaaacatttttgctggcatacctacagttgatgcttagtattgggctgattattaaaatagaccataccttggccaggcatggtggctcacgcctgtaatctcaacactttgggaggctgaggcgggcagatcacctgaggtcaggagtttgagaccagcctggacaacatgatgaaaccccattgccactaaaaatacaaaattagccaggcatggtggcacatacctgtaatcccaagtacttgggaagctgaggcaaaagaatcacttgacccgacaggcggaggttgcagtgagcagagattgcaccagtgcactccagcctggatgacaaagcgagactctatctcaaaaaaaaaaaaaaaaaaaaaaaaaaaaaaaaaaaagaccataccttcatgataattcataaataatctgaactgaagcctccaagcaccacaccctgtaaattccttaccttctatttattattattattattttttgagacggaatctcactctgtaacccaggctagagtgcagtggcacaatctcggctcactgcaacctccgcctcccgggttcaggcacgtgccaccacacctggctatcattattattttttttgagatagagtctccctctgttgcccaggctggagcacagtggcatgatctcagctcactgcaacctccgcctcccaagttcaagcgattcttttgcctcagcctcccgagtagctgggactacaggcgcatgccaccacatccaactaatttttgtgtttctagtagagatagggttttaccatgttggccaggctggtcttgaactcctaacctcaggtgatccacccaccttggcctcccaaagtgctaggattacaggcgtaagccactgtacccagccagcaacttccctaccctctaacaactaaagggttaatgcaggcattgcactggtctctgtctcccatccatggtcctggaagaaactgaggttctgagggggacatgggttgcctacagactgaccagtgctgggattggtcccagcccctgctgcccagccttactgctgggaagcccagccctcctttagtggtcattaaagatttttaatattgtcttagtatgttccttcccaaaataattttggataattttgtttctcttcaacacacacacacatacacacacattttaaagttcacaactaacatatttcttcctttgttttaaacattggcaaaggatgttaacatttgggtatactgtaatagcaacatatatatatatatatatatatatatatttagagacagggtcttgctctgttgcccaggctggagtgcaggggcgccaatcatagctcactgtaacctcaaattcctgggctgatgcctattataatcccagtgctttgggaggccaagacaggaagattgtttgaggccaggagtttgagaccagactgggcaacatagtgaaaccccgtctctgcaaaaaaaataaaaaaaatctagccaggtgtgctggcgcaacctgtagtctcagctactcaggtggctgaggctgtagtgagctatgattgtaccactgcactccagcctgggctacagaacaagactctgtctcaaaaataaataaataaattaaattaaattaaattaaattaaattaacaaaaagtttaggctactacctggcacagaaataagagttacctggtgctgggcgcgatggctcacgcctgtaatcccagcactttgggaggccaaggcaggtggatcacctgaagttggaagtccaagaccagcctgaccaacacagggaaaccccgcctctactaaaaatacaaaattagccaggcatggtggtgcatgcctgtaatcccagctacttgggaggctgaggcagaagaatcgcttgaacccaggaggtagagattgcagtcagctgagattgtgccattgcacgccagcctgggcaacaagagcgaaactccgtctcaaacaaaacaaaacaaaacaaaacaaacaacaacaacaacaataaacataaaaaaccaaaaaacccaaaaagacacaataaaaaaattaaaaaaagagatggggttttgcatgttggccaggctggtctcgaactcctggactcaagtaatctgcctggcatggcctcccaaagtgctgggattacaggcatgagctaccgagcgtggcctattacaccttgtaaccattttgcaactttatctcctggcctgatccaggcctacgtctccttcctggtccctttcctgggtcctccctgggctcctggacccagtcctgccctctccaatccatattccacacagcagccagacagagttctccacagtaatatttaagtgcctctctgctcagttgcctcccgcaagcctgaaatgccctgtgataaaacccatgctcctcatgccagccttccaggcccctcgggatctggcttctcctctccaggctctgctgaagcctctgccctcttcacccacagcacatttttttttttttttttctgagacggagtctcgctctgttgcccagtctggagtgcagtggtgcagtctcggctcactgcaacctccgtctcatgggttcaagcgattctcctgcctcagcctcctgagtagctgtgattacaggcgcctgccaccatgcctggctaatttttttgtatttttagtagagatggggtttcacgatgttagccaggctggtctcgaactcctgactgtgtgatccacctgcctcagccccccaaagtgttgggattacaggcatgagccactgcacccggccccaactgctcttctttcagttcctcaaatgcatggtgctgcttcctgcctcctggactttgcacgtgctgtgccctctgcctggaacaccctttaccctctttacccggtccccccagtaacttgtacttcctctgtcacagccctctttatgctgacctgcagcaaaccaagcaccctgtgggtccagggactgtgtcatgttttctgccatctccctgaacctttgtaaacacaaaagcacaggcattactgccccagggaccttgatccaaactccagctctgccacttaccagctgaggaacctcatgcaacctcttccgtgattggacctcagcttcctcatctctgaagtgaggatcacagcaccagcctccccgtgctatgtgaccacctttcataggggaatgacacaagatctgtgctgccctcacacatgggggagcagcaggggcttgcatgggccaatatgggcattctttttttttttttttttgagatgaagtctcactctcttgcccaggctggagtgcagtggcgcaatctcagctcactgcaacctccgcctcccaggttcaagcgattctcccacctcagcctccagagtagctgggattataggtgtgcaccacaacacccggcgaattttttgtatttttagtagagatggggtttcacggtgttagccagggtggtctcgatctcctgaccttgtgatccgcccaccttggcctcccaaagtgctgggattacaggcgtgagccatggtgcctggcctctttttaagctttttgaaaatctcagccattggccgggcgtggtggctcacgcctgtaatcccagcactttgggaggctgaggcgggcggatcatgaggtcaggagatggagaccatcctggttaacatggtgaaaccccatctttactaaaaatacaaaaaaaattagctgggcatggtggcaggcgcctgtagtcccagctacttgggaggctgaagcaggagaatggctgaactcgggaggcggagcttgcagtgagctaagattgtgccactgcactccagcctgggcggcagagtgagactcttgtctcaaaaaaaaaaaaaaaaaaaaaaaaaaatcagccatcaatacaaaaaatttcattgcctaacctggtgtacacaaacgcatacatatataattaaaatgagtttcacaaaactaatacttaacatgtgatacattttgatactatgtcatcatttgttaccctatattgttgatacacgttgtgaccatatgtttcagatctcattgtaactcacagtttgagaagcatcaggttgcaacaaccctgcaaggtaggtatcattatcctgtccacattgatggggaaactgaggcaattttaggcaaccgggccaggatcacacagctagtaggtagagaaggttgaatttttacctaagtaagtctgatccagagactgcaaaattcaatgctagtctaagtacctcctatataagatctcatttaattatcccaagagccctagggcaagtactaccagttttgtcatgatcttacacatatctaggtacacagatgacaaggcatttggtcacaaaggctgtaagccgcagagctggtgacttgaatgtgggcaggctggcaccagagttcatgcctgttaagactcttggccctacagaaccattgtgaactccagttaatccaagccccttctccctccctccctccctccctccctccttccctcccttctttccttccctccctccctccctccatccctccctccttttcttccttccttctttcctttcatcttgctgtgtcacccaggctggagtgcagtggtgcagtgatgcaatcttagctcactgcaacctcccaggttcaagcgattcttgtgcctcagcctcccaagtacctggaattacaggcacgtaccactgtgcccagctaatttttttttttttgagacagagtttcactcttgtcgcccaggctggaatgcagtggcgtaatctcggctcaccacaacctctgcctcccggattcaagctattctcctgcctcagtctgccaagtaactgcgattacaggcaccagccaccatgcccggctaatttttcgtatttttagtagagacggggtttcactatattggccaggctggtctcgaactcctgacctcgtgatccacctgcctcagcctcccaaagtgctgagattacaggcgtgagccaccgcacccagcctctttttctttctttttatgtatttttttaaatttgagagacagggtctcaccctgtcacccaggctggagtgcagtggtgcaaacacagctcactgtagccttgaactcctgagctcaagcaatcctcccacctgagccttctgagtagctgggactacaggcatgcatcaccacgcccagctaatttattttttttttgtatttttgtagagatggggtcttgctacgttgcccaggctagtctcaaactcctggcctcaagccatcctcccgccttggcctcccaaagtgctgggattataggcatgatccaccgtgcctggccagcccttccctttgctgagggggacagcaaagctgagagctgggaagagatttttcagagccacagctctgaagctccctaggctccagttcttaaccctctgagtgcagtcccagctatgaccagcagggtgggcgagtggaattcggtggaattagtggatttccaggtgactcagcgcctctcaacttctctctcttacttccttctccattactcccgaataaatgcttatcagcaaactggtttttactgagaggcccacagctccccattctccacaagtcaagatcctcacgtggtctccctggggaaggggagagttatggacctagagaagaactttcagagtccctccaagggagacagcagagtggggtcctgttggcctccacccttttggggcacgcagatagtcaatatcttcagcgtccccaaggcctgcaagggtggggccccatatctggaagtcccaggcccagctgggagttggtcaagtctgggctgtgggggcagggagtgctgggggatggttatccccttttctgccctctctcctggggcaactccaaattttcagccctcattgactttcccaggactgctgtccccaagtcttcactcatgtctctctgtgactccttcccattaggtactcgcagcaacctgaccccccaactttttcagtttccagcctggggacttgtggtggttaagagcatgagctgagttcaaatcccagtcctgtcagttaacagctgtgtgatattgggcaagtcactctctgggtctcagttttctcatctgtcaagtagggtgatactagttcccaccccattttgaaagctctcatgtgaagagacgacagagcaagcttggcttagtaaatcctctctgggagtgcgaacaaccaccaccacaaccacaataatgacaaccgcattgcataagagccctggacttacacacgactgtgccagtggagtcctcccggggctcccggggccaattcctctctggcttggactcacataaacttggatctcacatctttccccatttctgcccccgtggccacttgctttggcccctgagtcctcatacacctggctggggcgctcatggccccaatcagcctcggcccgaccccatggtgccccttcctaaagttctgcccgtctgtcccgtgacatgccccgcccgccccggctcatgcctgcttgcaccgcctgcgccagggtggtgagcccggtctggccagtggcgccgaagatcgcgatcttcttgacggccatcgtacgggatcgtgggggtgcaaggcctcagagtctcggcacgcgcgggaacccactggctgctgggcggtgctctctgccctactcaagccaggaacaacggggcggagctggctcgaagggccacgcctcagactctccgcccgcggctcaggtcaaggggcggggcctaacgcggatgggcggggcaggcgtcagcttgcattcgctcaccgtccagcaccgccctctctgcgcgccacttagactggaaggcggggccacagaaggccacgcctccacatagcaacaaatagagtggacggagccgagataacttgtcactcagcgccctgcctccgcgctccacctcccggagaggggcggggccaggcgagcctcacccacggcctctcgtagctcacgccccctctcccggagcctggagcggatctggggcgcactctaagccccagggcctcccagaaccagcaaggggagaaagttaggaggacagagtgtgtgtgtgcacttggatgtaagacactgtgtcacggcgtacctatgcacttatatgaccctgtgtgactcagtgacccggagggcaagcaggactgtgggtgacaccttgtgtcatcctctgagtgtgatcccgtgttacagtgtgactacacgtgcgtgacaccacgtgtggcaggcattgattctgttcttttgtgaccttgtggtgacaccgtgggtgacactgcgtcagcctgtacgatagggtgtgggacgtgtgaggtgtgctacatggaagcgtgagactaattagactgtgacagtgtgtgacaccacatgtctcgtgtaaggatgtgtgacaccgggaccccattcgagtgtgtggctgtgggtgtctgtgttgagctgctcattgtgaccccctgtgactatgatgtgtgaggtgcggcggtgcagcatgtgcggggcgactgctatgaaggttcgagtgtgtagagtgtgtgacactgtggctgtgaagctgtgcgtgatgtgtgggcctatgacactgtttgtgactgccggggagtgtgcggctgtgtgtgacaggtgcatttgtgtgtgacgccgcgtgggcggtggttaccctattggatttgtgtggtggtgggtgacaccgttccagtgtggacgccgcgtgtgacggcgtgagggtgtgaccccgtgagaccccacaggagggagtgacggcgcgcaagcgcgtggatgcgggggtgagtttgtgcgccgaggcccccgcgagtatggcagcgtggcgagcgtgaccccgtgggagtgtgcagcgcgtgacgccgccgtgccctcgcgagtgcagccgtgcaccccacgccgcggccgggtgtgactgcgcgtgggcctcgggcggcggggcgcggggaccgcgggcgggagggggtcccgggggcgcgctgagcgcggcggcggcgcgagagagggaggcgcggcggcgcatgcggatctggctgagccgcgggccggcggggccgagctgagccgggctgggccgggccgggccgggccgggcagcggacgccgacagggagggcggtcggtcgcggcgagcagcggagacagcgacgctggcggccgcgggcccaggtgagctgctaggggggccgacagcccctcccccaagtatgtccccacctggcgagcatccctcctccgcgcgcacggggcatggctggagccccgggtctccccggctggagggaggcaaagggtcgagggcaggacgagcccacaacccccccacccggtctagcttccgcgccacgcgtgggtcttacccccaggccttgtccttcccaggccccctccttgggcgcagtgtctggaccgcagggagagaggcgcggcctgggaagggttaaagcctctgatgccaccgcagcccagcgccccaccagcctttgcgggggggggggggtgttggggggaggctcgcaggacaccccttcccggcttccctattacctgctcccttccttcccattcaatcgcgttatggccagagctgatcctcggcctggccagagggctaacaggagtgctaagggcctccccatctctaagtgtcttccactgaagaaaacagctgtaaccaccgtttaacagggagggaaactgaggcacagaaaggccaagttaaagatactcggttaaagatacagcaagaataaagcggaacttgaactcatttctgtctgactccagaagaggcaaatcgatttgctgagatgtgtgaggaaaagatgaagaataatagcaaggaacatgtatcaagggcttgcagtgtaccagataccatgatccctgcattaataacttacctcttcaaacaccgctaagaaacgggtacgattatcattacttttttttttttttgagacggagtttcactcttgtcacccaagttggagtgtaatggcgcgatcttggctcactgcaacctctgcctcccgacttcaagcagttctcctgcctcagcctcccaagtagctgggattacgggcatgagctaccatgcctggctaattttgaatttttagtagacatggggtttcactatgttggtaaggctggtctccaactcttgacctcaggtgacccacccacctccttggcctctcaaagtgctgggattataggcgtgagccaccgcctggcctacccttttgtgtgtgtgtgacagagtttcattctgtcattcaggctggagtgcagtgagtcaatctcagctcactgcaacctccatcccccaggttcaagcgattctcctgcctcagcctcccaagtaactgggactacagacacgtgccaccacgcctggctaatttttgtattttttttagtaaagaccgggttttgccatgttggccaggccggtctcgaattcctggcctcaagtgatccacctaccttgacctcccaaagtgctgagattataagcatgagccaccgtgccgggccatcattactattttgcagatgaacaaactaaggcccaaagagtggaagtatttcagccaaggtcacacaggtggtaggtagctgtgtgctcactttcacttttccatggaaggagggaagaacaaaaatggatttgggactgggcacagtggctcacatgtgtaaccccagcactttgggaagttgaagtgggcaaatagcttgagcccagatgtttgagaccagcctgagcaacatagtgagaccccctctctacaaaaaatacaaaaattacctggtcatggtggagcttgcctctagtcccatctactcaggaggctgaggtgggaggatcgcgtgagcacaagagttggaggctacagggagctatgattgtgtcactgcactctagcctgggtgatagagcaataccttgtctcagaaaaaaaaaaaagatttcaatgtgtccccctaagggacaatttccactctactcactctactgaccaagacttagaccctgccttcctagaattcagtgggttggcaattgtctgggtcttttgaggacattgatctcccaacttcctcctttgttagtcttttttttttcctttttcttttgagaaggagtcttactctgtcgcccaggctagagtttagtggcacaatctcggctcactacaaccttcgcctcccggtttcaagcaattctcctgcctcagcctcctgagtagctgggattacaggcacctgcaaccttgcccacctaatttttgtgtttttagtagagatggggtttcaccatgttggccaggctggtcttgaactcctgacctcgtgatccacccgcctcagactcccaaagtgctaggattacaggtgtgagccaccacgcccagccgttagtcttagaatcaggcctgggggcccagaaggtaaaggagatacatctaatgtcacttaaccctttaaatttcttctctttttttttgttttttttgagatggagtctcactctctcacccaggctagagtgcagtggtgcgatctcggctcactgcgacctccgcctcctgggttcaagcaattctcctgtctcagcctcctgagtagctgggattacaggcatgtaccaccatacccggctagtttttatatttttagtagaggcggggtttcaccatgttggccaggctggtctggaactcctgacctcaggtgattcacccaccttggcctcccaaagtgctgggattacaggtgtgagccactgtgcccggccaatttcttctttttttaaataattttttgttttctatttttttattttcatttaatttaattttattttttctgagatggggtctcactctgtcgcccaggctggagtgcagtggcacgatctcagctcactgcaacctctgtctcccaggttcaagcgattctactgtctcagtctcctgagtagctgggattataggtgcacaatgccatgcctggctaatttcttgtattttagtagagatggagtttcaccaagttgcccagactggtctcgaacccctgagctcaggcaatccacccgccttggcctccctaagtgccaggataacaggcatgagccaccgtgcccggcctatttttatttttttatttttgtttgagatggtgtctcgccctgttgcccaagccggagtgcagtggtgccatcttggctcactgcaacctctgccttcccaggttcaagcgattctcctgcctcagcctcctgagtagctgggattgcaggcatgcactaccatgcccagctcatttttgtatttttagtagagatggggtttcaccatgttggccgggctggtcttgaactcctgacctcaagcgatctgcctgccttggcctcccaaagtgctgggattacaggtatgagccactgtgcctgccccctccactttaaatttttcttcttcttcttcttctttttttcttgagaatgagtcttactctgtcgcccaggatagagtgcagtggcacaatctcagctcattgcaacctgcgcctcctgggttcaaacgattctcctccctcagcctcctgagtagctgagattacagtagcccgaaaccacacccagctaatttttgtattttcagtagagaccgggtttcaccatgttggccaggctggtctcgaactcctcacctcgtgatccgcctgcctcggcctcccaaagtgctgggattacaggcaggacccactgtgcccagccccattaatgcaaatattctatcaccttttttttttttgagacggagtcttgctctgtctcccaggctggagtgcattggcatgatctcggctcactgcagcctccacctcccaggttcaagtgattctcctgcctcagcctcctgaatacctgggattacaagtgtgtgacaccacgcccagctaatttttgtatttttagagacagggtttcaccatgttggccaggccggtcttgaactcctgacctcaggtgatctacccatctcagccccaaaaagtgctgggattacatgcatgagccaccgcgcctggccctatcatctatgtttgaatcctagatactaactggctgtgtaaccttggaaaaatagatcaactcctctgtgcctcagtttcctcctctgtaaaataggtgtaataatagccaactgttagggaattaaatttgtggaaataataagagaaggtacatgaagtactgaccacagtgcaagtgttcaatatgttcattattgttattactgcattacagaactctattgttctaataataacagtgacaatttgctgagcccttaatatgtgccaggggctaagccatgtgttttatcacatcctgtgaagtggtgagggtgaacattattattattattatttagaaatagggtatcgccatattgcccagtttggagtgcagtgtcactattatagatcactgtagccttggcttcttgggctcaagccatcttcctgcctcagcctcctaaatagctgggactacgggtggcaaccaccacatttggctaatttttaaatttttttaaaagacagtttctggctctgctgcccaggctggagtgcagtggcgctatcttggctcactgcaacctccacttcacaggctcaagccatcctcacacctcagcctcctgagtagctgggattacaggcacgttgccaccacatccagctattttttttttttttttttttttgagacagagtttcgcttttgttgcccaggctggagtgcaatggcatgatcttggctcaccacaacctccgcctcccgggttcaagcgcttctcctgcctcagcctcccgagtagctgggattacaggcatactccacctcgcctggagaattttgtatttttattagagacagcgttctccatgttggtcaggctgatctcgaactcccaacctcaggtgatccgcccgcctctgcctcccaaagtgctgggattataggtgtgagccaccgtgcctggccaatttttgtatttttttgtagagacagggtttcaccatgttgcccaggcttgtctcgaactcctgggctcaagcaatccgccctcctcagcctctcaaagtgttgggattataggcctgagccactgcgcctggcttatttttatttttatagagatgaaatcttgctatgttgcccaggctggtctccaacccctgggctcaagcgattctcctgcctctgcctcccaaagtgctgggattacaggcatgagccactgtgcctaggccttatcattgttattatgtccactttaaagacagagaaattgaggacaagagaggggacaggactcaaagccagtcactgttagaaatgagacttgatcctagacctaacctacctctccctatgtccaggcctcaccttccccgatggcgcaggtaccaggggaagtggacaacatggagggcctgcctgctcctaacaacaaccctgctgcccgctgggagagtccggatcggggctgggagcgggagcagccggctgcgtccaccgcagcggcctcgctctttgagtgctcccggatcaaggccttggcaggtacctggaggagggctggggtgggatgaggaggagggggaagggggaagggtgcccgagaaccttggtggctgggagggtgggaaaagagaccagcactgtccaatagaactttccatgatggtggaaatagtctatatccataatgtaccatataataatcactagtctctgtgacttttgaatgctagaaatgtggccagtgctatgtgacagcctttgagttttaaattttatttagttttaattaaatttatttatatatatattttttgagacagagtcttattctgttgccccggctggggtgtagtggtgagatcttgggtcactgcaatctccacctcaccggctcaagccatcctcctacctcagccccctgactagctgggactacaggtgcccgccaccacacccggctaattctttttgtatttttagtagacaccgggtttcactgtgtttgccaggctggttttgaacttctgatcttaagtgatccacttgctttggcttcccaaagtgctgggattacaggcatgagccactgcacctggcctggtgttttttttttttttttttttgagacggagtttcgctcttgttgcccaggctggagtgcagtggcgcgatctcggctcaccgcaacctccacctcccaggttcaagcgattctcctgcctcagcctccctagtagctgggattacaggcatgtgccaccacgcccagctaattttgtatttttactagagacggggtttctccatgttggtcaggctggtctcgaactcccaacctcaggtgatccacatgtctcggcctcccaaagtgctgagattacaggcatgagccacggcacccggcctgttttaattaaatttaaatagccacatgtggcttgtgactgctgtataggtcagcacagccttagagccttagaaatgtacagtcccagaatggtgggactctgtaagcatattcccttagaatcccgaaatgcagagccatcagatccttggaacttgaaatgtctaagagattcttagacctcttgaaatgaagacctctggcctggcgcggtggctcacgcctgtaatcccagcactttgggaggcaaaggtggacagatctcttgagtgcaggagttcgagaccatgttcgccaacatagtgaaaccctgtctctactaaaaataaaaataaaaaaaaaaattagccaggcgtggtggcatgcatctgtagttccagctatttgggaggctgaggtgggaggatggcctgagactgtgaggtggagattgcagtgagtcaagatcgcgccactgcactccagccccagcagtaaagcaagaacctatctcaaaaaaaaaaaaaaaaaaaaaaaaaaaagagctttggaaatgtgaaacgttatcatcacagacctaagaaattttagtcattgttccctaggatcataggcccttagaaactgaaactgtaatacacaggaacctttgggacttgataatactaaacctttggagtttccaattagaaatgtggatcttgagaaatctgacatagagtgaccaaaaccttcctgcttttaccaccgaaactctcagccttgggccaaccagtacagtgggtcaccctaccattttttttttttttttgagtcagggtctcactcttcacccaggctggagtgcagtggtgtgatcatggctcactgcagccttgaactcctggactcaagtgatcctcccacctcagcctcctgaatagctggaactacaggcatgcgccaccatgcctggctaattaaaaataatttttttttttggcgaagcatggtggcggatgcctgtaatcccagcactttgggaggctgaggcggatggatcacttgagatcaggagtttgagaccagcctgaccaatatggtgacactactaaaaatacaaaaattagatgggtgtggtggtgggcacctgtaatctcagctacccaggaggctgaggcaggagaatcacttgaacccgggagatgggggtttcagtgagctgagatcacaccatttcaatccatcctaagtgacaagagcttaactccgtctcaaaacaaaacaaaaaaatttttttgtaagatggggtcttgctatgttgcccaggctggtgtggaactcctgggctaaaataaccctcccacctcggcctccgaaagtgctttgattacaggggtaagccagagtgcctagtagtcaccctactttgatgtatcagaacaatattagcaaagaccagagaactttatagttatagaaagaccttagacctttagaactgtagacccttgaaccttagtacttagtattcatagaggtctggaaccttagaagtgtttaatcatcagcattaaaactggcaaagaccctgaggagcctcagagatatggaacgtcataatcataagcctttaaaacatgacaccctagcacctttgacccttgggaccttaacatcttagaaacacggagcgctagaatcataaaatatagatgatcataatcatgaattcttaaaacccaaaggtcagaatcagttccctccaaatcttagaactttagtaactcagcagtttataatcacaagatggatctctgatactaagatttttggaactttatttatttatttatttatttgaggtggagtctcactctgttgcccaggctggagtgcagtggcgcaatgtcagctcactgcaacctccacctcccaggttcatgagattctcccgcctcgggagtcccgagtagctgggactacaggcccgcaccaccatgcctggctaatttttgtatttttaattgaggcggggtttcaccatgatggccaggctggtcttgaactcctgggctcgggcaatctgcccaccttggcctcccaaaatgctaggattacaggcatgagccatggcgctggctcaagaaacctggctgatctagaaacctgtagtcccagcactttgagaggccgaggcgggcggatcgcttgagcccaggagttcgagaccagcctggccaacatggtgaaaccccgtctctactaaaaatataaacattagccaggtgtggtggcgcatgcctgtagttccagctagtcaacaggctgaggtgggagaatctcctgagcccgggaagcagaggttgcagtgagccgagattgtgccactgcactccagcctgggcaacaggttgagaccctgtctcaaaacaataagaaacctggttaggcgcggtagctcacgcctataatcccagcgctttgggaggccaaggtggggggatcactggaggttgggtgtttgagaccagcctggccagcacggcaaaaccctgtctctattaaaaatacaaaaattagctgggtgtggtggcgcgtgcctctaatcccagctactcaggaggatgaggcaggagaatcgcctgaacctcagaggcggaggttgcagtgagcctagatcgtgccattgtactccagcctgggcgtcaatagcaaaactctgtctcaaaaaaaaaaaaaaaaaagagagagagagagaaatctgtatatgccacaaagtatgaaccagattcaactggtggattgccagctttgtctgatctagaaacctagactgatgaaaacatacactcatggaaacttacagtcatacttttagagccttagaaccttaaaaaggtaggaacatatcaacttagaattctagaatttactaatttagtgtaagtgagtttgtttttagttttgtttgtttgtttttgtttttgagaaggagtcttgctctgtcgcccaggctggagggcagtgacactatctcggctcactgcaagctccgcctcctgggttcatgccattctcctgcctcagcctcccgagtagctaggactacaggcgcctgccaccatgccccgctaattttttgtatttttagcagagatggggtttcactgtgttagccaggatggttttgatctcctgaccgcgtgatctgcccgccttggcctcccaaagtgctggaattacaggcatgagccaccgcgcccgtcctgtttttagtttttgtttgttttttgaggaggagggggtctctccatgttgcctagacaggtctcaaactcccggtgtcaactcatccttctgagtagctgggattacagatgtgtaccaccactcccagctgtagaatttattattattattattattattatcattatcattattattatttggactgctgccaggctggagtgtggtgataaaaatcatagctcactacaacctccaactcctgggcttgagcaatcctcccaccgtagcctcccaagtagctgagactacaggcatgcaccatcatgcccagctaattttcttattattttatttttttatagagacagggtctcgcaatattttccaggctgaacttgaactcctggactcaagtgatcctcccaccttggcctcccaaagtgttgggattacaggtgtgaaccactggaatttattttatctagaaaatattaattcagtgcctgctgtgtgcctggctcatgctggacaacatgaggggcatagtggtgactgaggcagcctgggtcctgcccccacaggactcataggtcagtgagagagagagatccggttagacaatgatgacccagaggggtcagagacagggtaggggaggcacaggcagagaggttggggctgttgacagaaaggcacaagcatcaggctgtgatggggaagcccaaggactgtgggagcccataggatgtacttgatccagcctggagaatcaaggagggcttcttggagaaggagaggcctaacttcaggcctaaaggatgaattggcatgaacactggagtgaagagtggaagagtattctaggtagagggaactgcatatgcaaggcctccagaagctgggagtggcttgactgagaaggatacaggtgaggagtaaatgatgatgggagaggagccagtggaagccagatcctttttttttgagacggagtttcgctcttgttgtccaggctggagtgcaatgccgcagtctcggctcactgcaacctccgcctcctgggttcaagcgattctcctgcctcagcctcctgagtagctgggattacaggcgcctgtcaccttgcctggctaatttttgtatttttagtagagatgggggtttcaccatgttggccaggctggtctcgaactcctgacatcaggtgacccacctgcctcagcttcccaaagtgctgggattacaagcataagccactgagcctggcagaagccagctcttaaagggccttgcggggtaccagggagctatggaaagattttaagcagaggtgggaagattttaagcagaggtgggatatggtaagatgagaattaaggactctccaaatcttagaaccatgcttctgagagcatcttgcccagggaaatgtagaaatcccctttaagataaaaaaaaaaaatcctctccagtttgggcaacaaagcaagatcctgtatgcacaaaactttaaaaattaactggccacagtggcatgtgcctatattactctggaggctgaggcaggaggatcgcttgagcccaggaattgaaggcagtgatctatgatggcaccactgcattccaaccttccagcttgggcaacagagtgagatcccaccttaagaaattttattttattttattttttttgagacagagtctcgctctgtcacccaggctggagtgcaatggcacgatcttggcttactacaacctctgcctcctgggttcaagctgttctccttcctctgcctcccgagtagttggtattacaggcgcccgtcaccacgcccagctaatattttgtatttttagtagagatggggtttcaccatgttggccaggctggtcttcaactcctgacctcaagtggtccacctgcctcagcctctcaaagtgctgggattacaggcgtgagccacgcccggcctgtatgactttcataaatgctcacaaatgcacaactctgcttaaatctcccatgcttagggttcacatatagctctacaagtaaaacacatttatagaggaactccagaccccaaaccagtaacattcagcttaatagtaacttcatgatgctgctctcctgctgaaaccaccttgccactcaaagtgcaaatatgacgtagaccactacgctgcatttcttttgcatccctttgcccagctctctcatggtttttctcccgcttttattttgaggcagagtctcactctgtcacccaggctggagtgcagtggtgctatcacggctcactgcagcctcgacctcccaggttgcctgtaatcctagcactgaggctgagatgggagcatcacttgagcccaggagtttgagaccgacctggacaacatagtgagaccctgtctctatcaatgttttcaacattaaggaaaattgtttggaccccacgttcagtgtgttctcctactcaccctccacagtttgtggctcactactgtcattgatctgtgtgacgcctctctccaattctcttttattcccaaatctcaaatcaatttcttctcccctgtaggcaaccactgacattgttttgttttgttttttaaataaagatggggtcttgctatgttgcctaggctggtcttgaactcctgggcccaagcaattctcccacctcgacctcccaaagtgttgggaagccactgcttctgaccccattcagatagtttttaatgtgaatctttttctttgcatgagaataattttgcaaaatgtgcattgctaatgagtaagcatatatatatatatatatatatatatatttaactttttattattaaagtagttcatgacacagaatggcagataaatcatgccaatatttccacaaatgagtactctcttgtaaccagcacccatattaaaaaacagaatatacaatggggtgtggtgactcatgcctgtaatccgagtgcgttgggaaactgaggcatgatgatcacttgaggccaggagttcaagaccagtctgggcaacatagagagaccccgtctctacaaaaaaaaaaaattaaaaattagctgggtggggccaggcgtggtggctcacgcctgtaatcccagcactttgggaggcagaggcggatggatcacgaggtcaggagattgagaccatcctggctaacacagtgaaaccctgtctttactaaaaatacagaaaattagctgggcgtggtggtgggcacttgtagtcccagctgcacgtgaggctgaggcaggagaatggtgtgaacctgggaggcggagcttgcaatgagcggagatcaagccactgcactccagccggggttaacagagagagactccgtctcaaaaaaaaaaaaaaaaaaattagctgggtgtggtggcatgagcctgtagtcctagctactcaaaagactgaggtgggaagattgcttgagcccgagttccaggctgcagtgacctaagaaggtgccactgccctccaacctgggcaacagaatgagataccatctctaaaaaacaaacaaacagaatgtgacatatgacagctccagaaaagcatcctcatgccacctccctatcactacagtccaagggtgtactctcttaacttctaacagctcagcttcattttgctggtgttttaactttctgtaaatggaataatgcattgtgtgttgttttatgtccggcattattcactcaacattatgcttgtgggagattcatccatgtctccctgtgcttgtggggtggtccttctccttgctgtatagtgttgcgtggtgtgaatgtaccacagtgtgtttgtgcattcacctgttgataagcatttgggttgctgctagtttggggctactataaatggtggtgttgggccaggtgtggtggctcatgcctgtaatcccagcactttgggaggccaaggcaggcggattacttgagtccaggagttcaagaccagcctgggcaatacagtgagaccccatttctactaaaaatacaaaaaagtttgctgggtgtggtggtgcatgcctgtaatcccagctactcaggacgctgaggcaggagaatcacttgaacccaggaggtggaggttgcggtgagccaagatagtgccactggactctagcctgggtaacagagtgagactctgtcttaaataaataaatacataaaataaatggtggtgttctcaagtttctagtacacatatttggtggacatatgcgcttgtttctggtggtttacacccacgcaggagtgaagctgtccaatcatagagtaagggtatatattttattttacatatatatgtatctgttgttgttaattgagacaaggtcccgctatgttgctcaggctggtctccaactcctaggctcaagcagtcctcctgccttggctgcccaaagtgtttggattacatgtgtgagccatgcgcccggccaagtgagtgcatatctaactttagtagagactgcccgtttgtatcgttttatattcccactagcagtgtaccagagattcagttactgtgcaccccacccttgcgatggtcaggttttttgttttgttttgttttgtttgagacagagtcccactctgtcgcccaggctggagtgcagtggcgcgatctctgctcactgcaacccccgcctcctgagttcaagcaattctcctgtgtcagcctctcaagtagctgggattacaggcgcacaccaccacgctcagctaatttttgtatgtttagtagagacggggtttcgccatgttggccaggctggtctcgaactcctgacctcaggtgatctgcctgcctcagcctcccaaagtgctgggattacaggcgtgagccaccatgcccagctgatggtcagtctttttaattttagccattttggtggctgtgcattctgttgtggttttactttgcattttcctgatgactaagaacaacgaagaaggtgaagcacattttcatacatttattggccattcaaatatcctttagtgagatggccattcaagtcttttttttttttcttttgagatggaatcttgctctgttgcccaggctggagtgcaatggcacgatctcagctcactgcaacctccgcctcccaagttcaagcaattctcctgcctcagccttctgagcagctgggaatacaggtgcccgccaccacacctggctaattcttatatttttagtagagatggggtttcaccatgttggccaggctggtctcgaactcctgacctcaggtgatcgacccacctctgcctcccaaagtgctctgattacaggcgtgagccaccatgcctggcctgatttttaattttttatacaatggggtctggctatgttgccaaggctggtgtggaactcctggcctcaagcaatcctcctgcctcggcctcccaaagtgctgggataatgggcatgagccaccatgcctggcctgatttttctattcctgattacagtcttgttagcatggagcaagagttgagaactgaaatgcccaccaagaccagacgggctgcatacactgagagaactgggacctcctgtaagagggcagcggccacatagctcccgcgatggcagcctggcaggaatggaggtccagggttgccgtatcatgtgatatttcatgagaagcccaaaatctaaattttttaaagacaaagtcttcctattttaaaatgttggcaactgatttacatttttataaaacgcagtcggggtgcaaccaaatatatctcagaggctgggcgcagtggctcatgcctgtaatcccagcactttgggaggctgaggcgggcggatcacctgaggttgggagttcgagaccaacctgaccaacatggagaaaccctgtctctacaaaatatacaaaattagccgggcctcgtggcgcatgcctgtaatcccagctactcgggaggctgaggcaggagaattgcttgaacctggggggtggaggttgcaatgagccaagattacaccactgcactccagcctgggagacagagggagactccatttcaaaaaaataataataaataataaaataaataaataaaatatatatgtatacacacacacacatagacacacacacccctacctctctcaagtatgagttcccaaaatcgatgatcccccagaatccactgaagaaagccaaatctagtccaaatccctctttttgcgaatgtgaaaactggggtcccgagaggggagatgacctcgagaagtcacctggccagttattagtacagacagggcagaacccagttgtcctcattctggtaccactctagggatgcactaaaattccactttggctttagtactagccaaaacctgctatttggcatgggcatcatctgttagaaggcagaggaataaatcctcaatttaaaataattaaaagagtataattggattgtctgcaacacaaaagtatctatcccttaaatatatataactgctatgtacccactaaaattaaaaatacaattttttaaaaaaaatattgcttcttactctagcagtagaaaatatacatttacttatctgtattttttaactttaaattgcaccttgaatgtttacctctagtttgaaaacaaatatgcaaatattaacagtaaatgcaaaggaaatatcttgtttgtgtcagtgtgggttttgtgctgtttagataagatgggaccctatgtgaatactgatcatcaatcatacctgagaaagtgatggcagaaaagatgctaaattgaggatttattcctctgccttctaacagatgatgcccatgccaaatagcaggttttggctagtactaaagccaaagtggaattttagtgcatccctagagtggtaccagaatgaggacaactgggttctgccctgtctgtactaataactggccaggtgacttctcgaggtcatctcccctctcgggaccccggttttcacatttgcaaaaagagggatttggactagatttggctttcttcagtggattctgggggatcatcgcaaagctcttcgcaaagctgaggtggaacgatggcttgagcctgggaggcagaggttgcagtgagccatgatcttacatcaccgcactccagcctggattttatacagggcagaccctgtatcaaaaaaaaagagagaaaaacaagtacaattaaattattattgaatataatcaccctgttgtactgatatcaaatactagatcttactcattctttccatattttgtacccattaaccatcaccccttcccttaaccccactattgataatgttacaaaaggtaaattttatgaaaaaggaaattattgagagatttcaaatggttgaaggagaaataaactggaaatatacatctttattcctgaattaatggaaaacttaataggaaacttaatattatttagtaatgggattttaacagtaactgtacaggctaagctgccaacaaatcgacttcacagtacagtggcttaatggagaagctatttctccctcccagataacctcgagatgatcaacacagttggcaggaagacttagctcagagaggtcagtgtacattccaggttaatttcatcttgtattctgtagacattgaccttggttttccagtttatgggagtcaggggaagaaagaggaaggccaggcagcaattttctttttcttttttaaactttatttttggccaggcgaggtggctcacgcctgtaatcctagcactttgggaggccaaggggggtggatcacgaggtcaggagatggagaccatcctggctaacatggtgaaaccccatctctactaaaaaaaaattaaaaaaaattagccgggcgtggtggcaggtacctgtagtcccagctactgaggaggctgaggcagaagaatggcgtgaacccgggaggcaaagcttgcagtgagctgagatcgcgccactgcactccagcctgggcgatagagtgagactccgtctcaaaaaaaaaacaaaacaaaaaccaaaaaacaaaaaacaaaaaaaccactttattggcacccaccaccatgcccgctaatttttgtttttctggtagaggtggggtttcaccatgttggccaggctggtcccaaactcctgtcgtcaggtgatccacctgcctcagcctcccaaagtgctgggattacaggcgtgagccaccgtgcctggcctaaactttattatttatttattttggaggcagagtctcgctttgtagcccaagctggagtgcagtggcacgatctcggctcactgcaacctccacctccctggttcaagcgattgtcatccctcagcctcctgagtagctgagattacagatgtgcgccactaagtcctgctagttttttgtatttttagaagagacagtgttcgagaggctggtctcgaactcctgagctcaggcaatccacctaccttggcctcccaaagtgccagaattacaggtgtgagccaccatgcccagcctttttaaaactttagattatgaaataattacacattcataggaagtcgcaaagatagtagagatgataaaaagacatgtaactggctggttgtggtagctcgagcctgtaatctcagcactttgggaagcgtacgtgggaggattgcttgagcacagaaggttgagaccagcctgggcaacatcgtgagacccttgtctctacaaaaataaaaattaaaaaatcagatgggcatggtggcatgtgcctgtaaccccagatactcaggaggtgggaggactgcataagcctgagaggttgaggctgcagtgagccatgattgtggcactgcactcaagcctaggcggcagagtgagattgtgactcaaaaaaaaaagagtaatcctactaaaaaatgtccaagggattttaatgacgtttctccaaagatatacaactgtctgatggagcatgaaaagatgctcaacatcattagccattagggaagtgcaaaagaaaaccacagtgaggtacaacttcacgcccactaggatggccataaaaaaaaaaaaaaacagtagagggaaatgaccaagcgcagtggctaacacctgtaatcccagcactttgggaggcctatgtgggtggattccttgagcccaggagtttgagaccagcctgggcaacatagtgagacccctgtctccacaccaaatacaaaaattagccaggcctggtggcatgctcctttggtcccagctacttgggaggctgcgatgggaggatcacctgaggctgggaggcagaggttgcaatgagccaagattgcaccattgcattccagcctgggcaacgtagtgagacccccgtctcaagggaaaaaaaaggaggggttgggaaacagcaagtgttggcaaggatttggagtcctcacacattgctggtgcagcaacttttttttttttttttgagacagggtctggctctgtcacccttgctggagtgcagtggcatgagcacaggtcactgcagcctcaacctcccaaggccaagcgatcctcctgcctcagccactcaaggagatgggactacaggggcattccaccctgcctggctaattttttgtatttttttgtagagacagagtcttcaccatgttccccaggcaggtctcaaactcctgtactccagcaatccacccgccttggcttcccaaagtgctgggattacaggcatgagccaccatgcctggcctatggtgcagctactttggaaaacagtttgacagttccttaaggccgggcgcaatggctcatgcctgtaatcccagcactttgggaggctgaggccatggctgtatttatccgtgtcctctctgaactgagctctgtgagggccctgctgtattcacagagccttgaacaggcacagagtgtgcattcgaatatttattgaatgaatgaatgactagagccaactggggtcacaagcagggaaggcttcctgtgcaagtgacatgtcaggaaaacttcaagggacaggaaggttttcaccaggtgggtggcagagggtcggggaaggcgtcacaggtaggaggagacatgactgctgaggctggactctcttttttttttttgagaaggagtcttgccttgttgcccaggctgcagtgcagtggcgtgatctcggctcactgcaacctccgctccctggttcaagcaattctcctgcctcagtctcccgagtagctgggattaacaggcatgcaccaccatgcccggttaagtttctttttgtatttttagtagagacaggatttcaccatattggccaggctggtcttgaactcctgactttgtgatctgcccgtctcagccttccaaagtgctgggattataggcatgagccaccgcgcccagccgactcactctttttttttttttttgagatggagtcttgctctgtcgcccaggccggagtgcagtgatgcgatcttggctcactgcaggctccacctcccaggttcaagcaattctcctgcctcagcctctccagtagctgggattatgggcgcccgccaccatgtccggctgctttttgtatttttagtagagacggggtttcaccatgttggccaggctggtctcgaactcctacctcaggtgatccgcctgtgaggctggactcttgcagagagctgggtctgagcaggcttggctcgcggagggctggggtgaaggtggaagcgcctgggggctcatcagggcctctcctccagatgagcgggaagccgtgcagaagaaaaccttcaccaagtgggtgaactcgcacctcgcccgcgtgggctgccacatcggggacctctatgtggacctccgggacggcttcgtgctcacgcggctcctggaagtgctgtctggggagcagctggtgagggggcctgaagggctggggcaggggtcctccctggggtctcaggctgggggttgggcttctctggaagggctgaactgcaagcaggggcctggctcatgggcgagtggaacgtgctggaagggccctgtgggtaagaggtccctctactcgggtgtgtggggctgtggcgctggggcggagcttggtcgtgagaagcctgggcgcgtggctggaaccgaagctgatggctcgctagctacggttgcgaggcggggcttcggtggaaggggccgggctctgttgcaaggggcagggctattagagaagggaggagctttgttagaagggactggcccgggttatgagctagtaggggcatgctataaaacaggggcagaactgtattgcgggttgggggtgggtagtggatgaaggtgcggggctctaggctagggggcagtgttcgttggtagggtgacacctaggtcgtcggtgtctagggacgcagacggtgtcctgggatgtggcttgttgtataaattggggctgtgtctctgggcttgaatggggtttcatctaaaagcgtgggattctcatggggtagagattcgttaaaggactggagcctggatctcaaggaattgtgaggggcatggctatggaataggaacaaacagctgggcgctgtggctcatgcctgtaatctcagcactttggggagccaaggtgggaggaacacttgagctcaggagtttcagaacagcccgggcaacataatgagacccccgtctctacggtttgtttgtttgtttgtttatttgtttaaattaaccaggcgtggtggcgcaggcctgtagtcccaagtacccaggaggttgaggagagaggatcgcttgagcctgggaggtcgaggctgcagtgagccatgattgcaccactgctctgcagcctgggcgacaaagcgagactctgtttctctctcttttttcttaatttttttattcttttaaatagatacgaggcgtcactatgttgcccaggctgatctagaactcctggactcaagcgatcctccagcctcggcctcccaaagtgctgggattacaggcgtgagccactgcaccgggcagagaccctgtctcaaaaataaataaataacccaagcgctgtggtgagacccgtttctacaaaaaatttttaaaaaatcaaaaagcattagctgggtgtggtggcgggcacctgtagtcccagctgctcaggaggctgaggcaggagaatcgcttgaacccaggaggcagaggctgcagtgagtcaagatcgcgcgactgcactccagcctgggcgacagagtgagactccgtttcaaaaacaacaacaaaagccaaaaaaaaaaaaaaagaaagaaaaaaaagaatagataggaaccaacgctgttggaaggaattgagccataaacaaggggaagagcactggggcagggcggagcttgattgggatgggcgtggttctagctagggacccgaaagggaagcagcgaggggtgtgacgcggagtttttgtttgtttgtttgaaacgaagtctcgctccctcacccaggctggagtgcagtggcgcgatctcggctcaacagcagcctccgcttcccgggttcaaaggattctcctgcctcatcctcccgagtacctaggattgcgggagcgcgctaccaagcccggctaatttttgtatttttagttagaggcagtgtttcgccatgttggtcaggctggtctcgaactcctcgcctcaagtgaaccacccgcctcggcctcccaaagtgctgggattacaggattgagccactacgccggggcggccatgggattagtggcaaaacattggtagagagggatccaatggcagggccagggctgagactatgggctaggagggcggggcttcatgatgggggcgtggttatcaggttcgaagtggggcgcccgtggaaggggcagagccagggacgtgaataaaccttgaagggatgtgattctttaaagggtctggctatgggaagagacagagcttctttagaaggattgagtcctgtgtcttggataaaacgagaggaggacagcctgatcctggacactcagggggcgtggccacgggaggcgggcttctttggaagctgcggggccgagggcgccatactcctgtctgtccagacccccgatcgcccaccgcccctgtcgccctagcccaggcccacgcgcggccgcatgcggatccactcactggagaacgtggacaaggcgctgcagtttctgaaggagcagcgcgtgcacctggagaacgtgggttcgcatgacatcgtggatgggaatcaccggctgacgctggggctggtctggaccatcatcctgcgcttccaggtgaccctcgagtggcccctgccaagccccgcaacatgggacttaggaaagcgttccccaccatttacccattcattctttccttccaataatatcctaatatgctggaatcctattccaggtgttagggatgaaaataatgataaaaataattgtcacgatcaccaccatcacgataatcattttgtatcgaccctgttccaaacactgttctaagcacttgacatttaatacacacagcaaccccataaattaggtactatttagtaccccattttaccagtgaggaaatggaagcccagataggtggtgtcatctgcccaagatcacatatacctgggtgttggagctgaaattcgaatccaggcaatcttgatccagtatagagacaaatagacaaaggtgtgccttttaggagcttacattgtggtgaggaagacagataataaatacataaatatgtaaagaagacatgtatggaaaaaggaccagttctagttagagaagtttaaaaagctatgcagggccaggtgaagtggcctgtaaacccagcactttgcgaggctgagatgggaggaacactaaggccaggagtttgagaccagcctggccaacataatgagaccttaaataaatttaaaaaattagccaggcatggtggtgcatgcctgtggtcccagctactcaggaggctgaggcaggaggatcacttgagcccagcagtgtgaggctgccgtgagctatgatcatgccactgcactccagcctagacaacagtgagaccatgacttaaaagaaaaaaaaagctacccagaaaaatacagattatgataaaacaagtaatagggatataaaatgtcagttggtggtgttgagattttagatatggtggtcagaagagggctgtctgggaagttgatggctgaatgacatacaaagatgaagagagaatgcattccaggcagggggcacagcagatgcaaagtccctgagatagaaatgagcttggcctgttggaaatacaggaggaagagcagagtggctagagaatgggaggcaacgggagacatggaggagctgaggctcaggggatggaaggggctaggtgatctgtgatgagtagtttggattttattctgtctgagatggggagaggttgcaacattttatcaaggggaggtgcatacaagtttagaaagatagatccctttggctgggcatggcggctcatgcccataatcccagcactttgggaggctgaggcaagaggattacctgagtttaggagttcgagcccagcttggccaacatggtgaaaccccgtctctactaaaaatacagaaattaactgggcttcatggtgcacgcctgtaatcccagcgactcaggaggctgaggcaggagaatgtgagccgagaccacaccactgcactccagcctgggtaatagatagagactctgtctcaaaaaaaaaaaaaaaaaaaaaaaaagtgaccgggcttggtggctcatgcctgtaatcccagcactctgagaggctgaggtgggtggatcacctgaggtcaggagttcgagacaagcctgacaaacatggagaaaccctatctctactaaaaataccaaattagctgggcctggtggcacatgcctgtaatcccagctactagggaggccaaggcaggagaatcgcttgaacctgggaggtggaggttgcggtgagctgagatcacaccattgcactccagcctgggcaacaagagtgaaactccatctaaaaaaaacaaaaacaaaacaaaaaaaaaaacaaagaaagatccctctgggttggaggtgttcaccaacattgggagctgagagcccagggaggaggatagagttggaccagggtgggactatggggaagcaacaaggggcaggtggggaagacactcagggagtggagtggacaggccttacgggaggggagagggagagggtgtccaggggaagactcagagctctggcctggggactagaggatgatggggctgccctgagacagggacagggagaaggagcaggtttgaggaacaccctgaggccagtttgagatgggtccagtggttatgggtccaggacattggagttggggatgttccaggtagatggaacagccagtgctaaaggaccaaggagggaggatgcttgtgattcaggaaaaaggccagcaggtatggagtggagtgagctgttgaagatgaggtcatcaacttactgatgggagatcatgggaacttttacttttaccttgaatgaaacagagatacggagggtgttgaaaagaggagcaaggatctgatttgagtgttcgcagggtccctctctctgccatgtggagaacacactgtggatgcaggagtggggagatcagcatgaaggccaccgcactagcctaggcaggagacggcagtgccttagaccaggaaagtggcccagatgctcagtttggaggctttcttggaaacagagaccgaagtcctaactgatcccctaattgtggatgtcctggccctcaggaattatcctcacactcctggacccccacccccagccagaagctgcctcccccatctcctctgtcacctgccaccttctctggtagcagatggtgagtggggggcattcgaagcctcaagctctccaggccctggtagccattttttgtatcttcacagattcaagtcatcaaaattgagactgaggacaacagagagacacgctcagccaaggatgctctgctcttgtggtgtcagatgaagacagctgggtaagcacccccaccaccttccttaggaggttaggcaagtggtcccctaacctctgcaattccttcccagacaagagctcaaggggcagcccatgtcctcagggtcaaaaagttacatctgaaactaaccagctggtaaataaaatatgtccacttctccagccttgactaataatccttcctaacatgctagaaggccaggttcaaatttattttgaacttgctctgtcacccaggctggagtgcagtggcatgcactgaatagctcactgaagccttgatctcctaggttccagtgatcctccctcctcagcctcccaagtagctgggactactgcaccccacccagtttcaaatgtagaactcttggcctcactaggcacagtgtctcatgcctgtcactttgggagaatgaggctaggactttgagatcagcctaggcaacatagcaagaccccatctctacaaaaagttgtggggttttttttgttgttgttgtcgttgttgtttttaatcacaggcatggtggcagacgtctgtagtcgtagcttctcaggttcccaggaggctgagatgggaggatcatttgagtccaggagttcaaggtgcagtgagctacgatcatgccactgcactccagcctgggctacagagcaagaccctgtcttgaaaataaataacaaacacataaataaataaacaaacaaataaataaaaataaaatagaactcttggactcctcagagaccaatgctggaaagaggtgaactgtccccagcctgctctcttctctctctcccccatcccatttcatcctacatttcaagagatctcacattcacctgtgtggaccctcagtgctatgtccaagctctggccaccctctcccgctgtgagcatctcccttctgcctcacagggcatacacaggaaagttcaaagtccttggtcgcttcagtgtggctgagctggtggcggggtggggtgcaggctctactgggaaggttccctttggcccccaactctctgccctgcagggagcagtaagacctgaaactcaattgtcctctgtagagcagctcctgggaggacggagggaggggcaggtgtgggatggaggtgggcttctctgactctcatccttctggctgtctgtcttgcaaaggagatcatggggacttttgccatctgtttctccatgtgtctatctctatatctgcttttccttgtacttatctcttctctcctccctccttccctcctttcctccttcccttttctcttcatgtcttctttctctctcctctcctttccctccccatctctgtctatatcttgctctctccctgtcttgatacctctctccttcctctctctctccttccctctcttctctcttctttcttttgcttctctttttctcttctctcctgctatctatcttctatcaatctatatatctatcatctatcaacctatatctattatgtatgtatgtatctatctatctatcttctatcaatctatatatatatcatctatcaacctatatctattatctgtctatcatctatcaatctatctatcacctatttatcatctatctatgtatctacctatctctctctctactcaccatctatcacctgtctatcatctatctgtgtatctacctatctctctctctacctacccaacacccacccatccatccatctttctatgttctaccccctctctctcatcttccttccctatcattcggtctccctctgtctttttcccctttcttccctcctaactctccccatctctgcctctgtttctcccttcacccttccagttaccctgaggtaaacatccagaatttcaccaccagctggcgggatggcttggccttcaatgccctcattcaccggcacaggtaccacctggcctgggacagcccagtcctgcccttcagccccccatatccctgcagctgcacacctgtacatgtacttgtgtagatggcacacacagacataaagacccatcccttcacctctacacacacatacagttttctttcccttcacacacatgccctgcacatttacacacaggaacacacacccacacaggctcctgtccaggccacataccctgtgcacacatggacacacatgagccctcgcacagatgcatacacacacacagatacccacgcacgtgcacagcctgcccgcagggtaggaagctcgctcccctgtcactgtcatgctgctgtgtacccagcacctcctcctatcagaaaatgctttctcaggccaggcgcagtggctcacacttgtaatccctgcactttgggaggccaaggtgggaggatcacctgatgttaggagttcaagaccagcctggccaacatggcaaaaccccatctctactaaaaataaaaataaaaaattagccaggtgtggtggtgcgcccctgtagtcccagctactggggaggctgaggcaggagaatcgcttgaacccaggaggcggaggttgcaatgagccgagattgtgccactgcactccagcctgggcaacagagtgagactccacccctaacccccccaccaccaccaaaaaaaagaaaagaaaagaaaacacttcctcaaagtgagcccttagagtccccgtccctgtacacccacggattcataccttggggcctgacattgaaatagctgagggtcagacacccacacaaattagacacacatcatgatcattcgcatgacatattggggaaactgagactcaggcgcaggaaggggcttgtggtggtgtagctgaagccagaacccagctttttctgctgtggacacctgtccactcacaatccctgcttctcacacctacacacactcgtacacacatggggagacccagacccacctccatacacagaaactcacaagctgcaccagggtcatcctcacactaggtgacattcgctcagtgttttctatgcacaggcactgttctaagggcttcccactaaaacattcaatagtcaatgtatccattcagtgtgtccgatccacctatgggcaggtgctatttttatttatttatttattttgagggtgagtctcactctgtcccccaggctagagtgcagtggcacgatctcggctcactgcaacctctgcttcccagattcaagtgattctcctgcctcagcgtcctgagtagctaggattacaggcgcccgccaccacacctggataattgttgtatttttagtagagatgaggtttcaccatgttggccaggctggtcttgaactcctgacctcaggtgatccacccacctcggcctcccaagtagctgggattacaggcatgtgccaccacgcccggctaattttgtttgtttagtggagatggggtttcaccatttgggccaggctggtttcaaactcctgacctcaagtgatctgcccaactcagcttcccaaagtgctgggattacagggatgagccaccatgcccggctggcaggtgctattattatccccattttagaggaaaccaaagcacagagaaacgcagtagctcacctagagtgacacaaccaggatatgaccaagctggggctcaagctctgatgaactggctctggtcctcacacttctaaccactgcataacactacataagaatccccaaagtaagcatatgtgtgtcagaggtacatgtgtcctggccagacgcagtggctcacacctgtaatccctgcactttgggaggcctaggcaggcagatcacttgaggtcaggagttcgagaccagcctggccaacatggtgaaaccccgtctctactaaaaatataaaaattagcagggcctggtggtgcacacctgcaatcccagctacttgggaggctgaggcaggagaattgcttgaacctcggaggcggaggttgcagtgagctgggatcgcgcccctgcactccagcctgggtgacagagcgagactccatctcaaaaaaaaaaaaaaaaaaaaaaagaggtacatgtgtcctcacacaacacacataagggctgtacacactcgtattgtcatatgatttcacagagacatacacaggcaggcaccgtgtgggctcatctcttccaagcacactcaggctggcctacccattcgtctgtgtgcacaggccggcccagcaacaaatgcacatgcacacacacattcccgggaacgcacagagacatgcccgcgtccatcacactcacatcacagctaaatgctgcacagcacacacagcttgccccttggctagactgtgcccttctgcccattgccctgggcagtgctcagacaagggtggcttcttccctgcttgcccgccggctctggagcctgcctgctgcctgcctgctctgtgcccctgcccaggcctgatctcgtggacttcagcaaactcaccaagtccaatgccaactacaacctgcagagagccttccgcacagctgagcagcacctggggctggcgcggctgctggatcctgaaggtgagcctctcgcgggcccagcccagacttcgtcttgggggactcccaaccccaatgccatgtcacactcaactccatcccaccccagcaccatcccaaatcctgaggcctctccaaatcccaactctttccaaatcccaactgtctcctcagcctcctccccttgtgcctccccttcctcatgtgcgatccctcccacataccatcctcacacctcttcctctctcatccccaaccgtgtcccaacgtaacccctcctcttccccattctcaatttccacccatccccaacaccctccccaaccctgctttcaaccatctcccactaaaccaactcccactcccctaccccagccccaaacccagtggcatctccaacgccatccccacccctaacgccaaccccatcttcaagtgtctccatccccaccacatcttcggctccaactccattcctatccccaccctaatccatttccaaactcatttcgccctagcccatccccatgtctatctctcccacaactccatcctcatcctcagctgcttttccatttccagtctatccctaatcccatccctgacttcagcctcagccccaaaccaggatcagccctgacacccatctcccatcccaaattaaagctgctcccttcctctgagctctactgtgtgccagacacatgtctgggaaccttatcagagctgttcactttcatcttcacactgacctggttagagagaatttatcaaccctgttttattttattttatttatttatttatttatttatttatttatttatttatttatttttttagatggagtctcactctgtcgcccaggctggagtgcagtggcatgatctcggctcactgcaagctccacctcctgggttcacaccattctcctgcctcagcctcccaagtagcttggactacaggcgcccgccaccacgcccggctaattttttgtatttttagtagagacggggtttcaccgtgttagccaggatggtctcgatctcctgaccttatggtccacctccttggcctcccaaagtgctgggattacaggcatgagccaccatgcccggcctatttatttaatttttgagacggggtctggctctgttgcccaggctggagtgcagtgccatgatctcggctcacagcaacctccacctcacaggctcaagtgattctcccatctcagcctcccaagtagctgggactacaggtgtgcaccatcacacctggctaatttttgtatttttagtagaggtggggtttcatcatgttgcccaggctggtctcaaactcctgacctcaggtgatctgcccactttagcctcctaaagtgctggaattataggtgtgagccaccgtgcctggacgttttatttatttattgttcttatgttcatttatttatttatttgagacagagcctcgctctgtcactcagactggagtgcagtgggggcgatcctagctcactgcaacctccgcctcccgggttcaagtgattctcctgcctcagcttcccaagtaactgggactacaggtgcacgccaccaagcctggctaatttttttttttttttgtatttttagcagagacagggtttcaccattgttggccaggctagtctcaaactcctgacttcaagtgatctgcttgcctcgtcctcccaaagagctgggattacaggcgtgagccatcacacctggcttacttatttatttttttatccaactgaatttaatatttaaaccctgtttaattattattattatgtttgaaatggggtctcactgtgttgcccaggctggagtgcagtggcacaatcttggctcactacagcttcaacctcctgtgctcaagcaatcctctcacctcagcccccagagtagctggggctataggcgtgcacgaccatgctcagctaatttttgatttttttttttttggtagaggtggggtctcgctatgttgcccaggctggtctcaaactactggactcaagcgatcctcccaccttggcctcccagagtgcctgggattacaggcccgagccacatgcctggcttaacctgtcttccaaagtgatgagaatgacagctcagggatgttgtcacttgcccagcatcacactgaaaatcaggaaaccagaccttatggctccagaattcatggtcttaatcagtcctctaccctgcctcttatagctgtatcctgtgctcagtgcctggtacgtagtaggtgctaatggatgtcagttggacaaggcagtgaagaataaaggccaggtatactgttgtgcatccagtgggtaaattaaaatgatatcactcagtcatggtgatggcttgtgcctgtaatcccagcactttgggaggttaaggcaggaggatcgcttgaggccagaagttcaggaccagcctgggcaatgtagtgaaatcccatatctacaaacctgtagtcccagctacacaggaggccaaggcaggaggatcacttgagcccaggagttcgaggctgcagtgagctctgattacaacactgcaccccagatcccaactcaaaaagcaaaaaacaacaaccaattaaagtgatgttagaatttgttgagtttcccctctgtgccaggctagtctttctaatacttacattgttcccaggaggcaggaaccatgataatctttattataacaatggggaaactgaggcttagagaagctaggttattttctaaggacatgcagtgagtaagtgttgaactgggatccaagtgcatgctgcctccaaagcctatgttcttgacatcaagccttgtgcacaatttgcaagctaactaaattttaatttagcacctactgtgtgctgggtaagacagaacagtgataaagaagataggcatacggctgggcccacgcctatagtggcccacgcctatagtcccagcactatgggaagctgaggcaggagtattgtttcagcccaagagttcaagactagcctgggcaacacagagagaccctgtctatgttttataaaaaataaaaagtctatttaaaaaattacaaaaaattagccgggcgtggtggtgtgtgcctgtaatctcagctacttgggaggctgaggcatgagaattgcttgaacctgggaggcagaggttgtggtgggccaagatcacgccattgcactccagcctgggcaatagcttgagactgtctcaaaaaaaaagaaagaaaaagaaaagaaaggaaaggaaaggaaaggaaaagaaaggaaacaggcatagtgtttgtcctcatgaagctcaagctctagataatgacataatcacataagtgaatatgtaattacaaattgtgatacattctgggaaggacatcataagatgctaagaggagaataacatgaggattatcaactatagacagagtgaacatggaggcttgtctaaggaaatttgagttgagccaggcatggtggttcacacctttagttctgactactcaggaggctgaggtgggaggattgcttgaacctaggagctcgaggctgcagtgagctatgattgcaccactgcacaatcagcctggacaagagagccagactccatctcttgaaaaaaaaaaaagtaaaaagttgagctctgaagaataagtgggaattaggaacacagaagaggaacagtgctccagacagtgagaacagcacatgcaaaggccctgaggtggaaggtagaaaggtgtgttcaagaaacaaatataggccaggtgcggtggctcacatctgtaatcccagcactttgggaggccgaggtgggcggatcacctgaggtcagcagttcgagaccagcctgaccaacatggtgaagccctgtctctactgaaaatataaaattagccaggcatggtggtgcatgcccataaccccagctacttgggaggctgagacagaagaatcacttgaacctgggaggtagaggttgcagtgagttgagatcgtgccattgcactccagcctgggcaacaagagcaaaattccatcttaaaaaaaaaaagaaaagaaaaagaaaagtatagcttatttctctgcggtggtttatatgtgtcaggcactatttaattccaggaggtagatttctatttgacggatacaaaacctgaggaacagagaggttaattatcttgcccaaggtcacacagctagtgagagtggcttctccatccctccatccaataccttcaagcactctgtcaaagtgcccactgtcttgtttccccactccctcttgcttccagatgtgaacatggaggctccagatgagaagtccatcatcacctacgtggtctctttctaccactatttctccaagatgaaggctctggctgtggaggggaagcgtatcgggaaggtataaggagccaaggagtgggtgagtgggaagctggaagctggtggcaggcacgggtgggatgaggctgaccccccttcctctgctgtgtcaggtcttggaccaggtattggaggtggggaagatcatagaacgctacgaggagctggcggctgagctgctggcctggatccaccgcaccgtgggcctcatcagcaatcagaaatttgccaactccttaagtggggtgcagcagcaactccaggctttcacggcctattgcacgctggagaagcctgtcaagtgaggcccagctctggagggagggtgggcaggggtggcatgacggcagggctcctgagctcatgccccttcaggttccaggagaaggggaacctagaggtgctgctcttcagcatccagagcaaactgcgtgcctgcaaccgtcgcctctttgtgcctcgggagggctgtggcatctgggatattgacaaggtgaggccggggatgcaggggagaggcggggttgcactgtggagttgtataggttgcacactgctcaagggaatcattcacattgtagacatgatggattagatattcattctgacagtttttcagtagtaaagtgtcataaggaagcaatattttttccaatttgcatgaagttgccataatgctatgagtgacctcagactaagtcaagaccattaaactgtggggagctgtcagagtctgagtgcctcctcccatctcctgcaggcatggggtgagctggagaaggctgagcatgagcgggaggctgccctacgggctgagctgattcggcaggagaagctggaactactggcacagaggtttgaccacaaggtggctatgagggagagctggctgaatgagaaccagcgtctggtctcccaggtacaaggtgtagggcttggctccagggtaaagggacggagggcggggctgatggtcctgggaccagagagggagacttgatcttctaggcaacagggaagagttagattagtctcctggtgataaatgaggatggggatgggagacttggccttccaagtgattgttgggtgaggggaatgggcctgatctccagggtaatgggagagtgaggctggtctccagggtaactagagagggcagaattcatcttttcaggaatgggggagtgttttaagtgacaagggaggttgtatcttgtgtctagggtaactcagaaggatagaattggtttcctaagtaacagagtcaggtaaacctggtccctaatctccaggacaggggaagcatgggcctccttcctgggtaacaagtttaaggttagagatgtaacaggagggtgggacttgtttccagggtaactggagagagtggggctggtctctggggaaacgggaaggtggggttggtctctagggcaacaggggagggtgggtctggtctccagggtaactggggaagattgggctggtctccaggacaacaggggagggtggagctggtctccaggataactgtggaagatgggctggtctccagggcaacaggggatggggggttggtctttagggtaactggggagggtggggctggtctccaaggtaacaatggagggtggggctggtctccaggttacctgggtaacaggggaggatgaggctggtctccaggataactagggagggcagggccagtctccaaggtaatggagtggggagtccccagggtcacacagggtcaaggtaacaggtggactgctgaggcagcatgggtgagtgtctggctcactgccccaggacaactttgggtatgagctgcccgcagtggaggcagccatgaagaaacacgaagcgatcgaggcagacattgcggcctacgaggagcgggtgcagggtgtggcggagctggcccaggcattggcagccgaaggctactacgatatccggcgggtggcagcccagcgtgacagcgtcctgcgccagtgggccctgctaactgggcttgtgggtgcccggcggacacgacttgagcagaaccttgccctgcagaaggtcttccaggagatggtgtacatggtggactggatggaggagatgcaggtgccggcgggggggcggggatgcgggtggagtgccaggagggaggggaggatgcagacgctgaaagagttgtcagacagctggagatggagagggaagggcagagatagaagaagatagagagaaagccagggagacaaaaagagagaacaagagagagagggagagaaagatacagagatggacaagagaggcagacaaagaaacacagaatgagaaagagacagagacaaatagagagaaatagaaacatgctggacacggtggctcacacctgtaataccagcactttgggaggccaaggagggcagatcacttgaggtcagcagtttcagaccagcctggccaacatggtgaaaccccatctctactaaaaatacaaaacaattagccgggcgtagtggcgggcgcctgtagtcccagctacttgggaggctgaggcaggagaatggcgtgaacccgggaggcggagcttgcagggagccgagatcccgccactgcactccagcctgggcgacagagcgagactccgtctcaaaaaaaaaaacaaaaaaaacaaaaaacaattagctgggcgtggtggcgtgtgcctgtagtcctagctatttgggaggctgaggctcaagaattgcttgaatccaggaggcagaggctgcagtaagccaaggtggtgccactgcactccatccagcctgagtgacagagtttgattctgtttcaaaaaaaaagagagaaatgaaaaaagacatagagatatagaaacagagtaaaccagggatgcagacagagagatagtgacagtttgagagagaggaaatcagagagacagagagaggagaaggcagacacaaaggtgacatggaaatctacatgactacagagaaagatacaggaagatggaatcaatttaagagagagagagagagacctaccagatctagagagagatgagacaagaaagatagaagccagctgggcatggtggctctcacctgcggtaccagcactttgggaggccgaggtaggcagattgcttgagccccagagtttgagaccagcctgatcaacatagtgagatcctgtctgtacaaaaaaaaaaaaaaaaaaaattagctaggcgtggtggtgtgcgcttgtagtcccagctactctgaagtgggaggatcgcttgagcccaggaggttgaggctgtgtgagccatgattgcaccactacacttcaacctggatgacagagtgagaccctgtctcaaaaaaaaaaaaaaaaaaaaaagaagaagccgggcacggtggctcacacctgtaatcccagcactttgggaggctgaggcaggcagatcatctgaggtcaggagttcaagaccagcctggccaacatggcgaaaccccatctctactaaaaaatacaaaaattagccgggcgaagtacatctaatcgggaggcaggagaatcacttgaacctgggaggtggagtttgcagtgagctgagatcgcgccactgcactccagcctgggtgacagaggcagactctgtctcaaaaaaagaagaagaaaaaagaatgaaagggaggaaggaaggaaggaaggaaggaaggaaggaaggaaggaaggaaggaaggaagaaagaaaggtgaacaggagacacagacaggaaggtgaacaggagatggagagaaagagaaaagggtagaaatgtagaaagagaggcagagaaagatggagacaaagatgtatagataagaaagacatggaggcagagagtgagccactgtgacagagacagagcccagaaatgtggagtccacgagagatggaaacattcagagagagactggtagagagagagggagacagagacagaacaccatggctagctgtgagagctgacagcagctggggctcagcttttttctttctgatgaggaaaccgaggtccaggccacagagctggtaagagagtcttgaggctggtccatatctctccaagagggtcagagtcgggagtgatggtgcagagtagcaggggctggcataggcaatgggggagaggtgagtggcccagggcagtgccagaggtgtgctcagtgctgtccccgcttgtaggctcagctgctgtcccgggagtgtgggcagcacctggtggaggcagacgacctgttgcagaagcatggactgctggagggagacattgccgcccagagcgagcgggtggaggctctcaatgccgctgccctgcgcttctcccagctgcagggtgagtcttggggctggggctggggctatgggtggagactgtcaggactggtgctaatagaggcaagagtgactcctgagagaaggaaagagtgagctccttgtccttggaggcatttaagcagagcctaagattacattccactggggaagtcatagggagaatcagtgccctgagtggcaggatgggccactcgacctcttcctgctttagattctgcagtaataacccacatttattgagcacttgttatgtgccaagcccttcacagattgatctcaacgaataccatttaaaaagacttgtgtgggctgggcacggtggctcatgcctataattccagcccttttggaggccgaggcaggaggatcacttgagcccaggaattcaagaccagcctggccaacatagaaagacatcatctgtaccaaaataaataaataaataaattagccaggcacggtgatacaagcctgtagtgccagctatttggaggctgaggcaggaggctcacttgaggccaggaattggaggcttcagtgagccatgatcatgccactacactccagcctgggtgacacagtgagatcttgtctcttaaaaaaccaaaaagaaaacttgtgctaagtaatgttaatcagggcctatttaacacaagtgatagaaactcagttcaaatggcttaaggtgaaaaggagtggattggctaatgtaaccaaaatgttcagggaagcctagtcaacatggcgaaaccccgtctctaccaaaaatacaaaaaattaggtaggcatggtggtgcacgcctgtagtcccagccactgcagaggctgaggtgggagaatcacctgagcctgggaagtcgaggctgcagtaagccaagattgtgccactaaactccagcctgggcaactggactgagaccctgtcagcaaaaaaataaaataaaaaaaaaaaaagtctggggaagggtgggttttacctcaggcatggctggatccaggtatggctcaagggtgcttttaggactccatctgagaccaggcatggtgtctcatgcctgtaattccagagctttgggaggcaaagatgtgaggattgcttgaggccaggagttttgggcaacatagtgagaccccatctctatatcaaaaaagaaaaaaaaaagaaaaagactcaggccaggcacggtggctcatgcttgtaatcctaacactttggaaggccgaggcaggcggatcacttgaggtcaggctttggccaacatggtgaaactccgtctcttctaaaaatacaaaaaaattagccggacatagtggtgcacacctgtaatcctagttactcaggaggctgaggtgggaggattgcttgaacccaggaggcagaggttgccatgagccgagatcgcaccactgcacactccagcctaggtgacagagcgagactccttctcaaaacaaaaacaaaagactccatctctctcgtctctctccatcactagtctttgtgttagtgtcactgttgagcagtcctgtcccttgtggtataaatctgggatcattcagccccaggtatacagcctaacaggttagcagagccaatgggacccaggcccctttctcccaagagttctgacaaaaagtcctaggagagcttgcattggctcacagtgggttccatcattgctcagccaatcattgtggccccagggcatgcagtgatctaatcggccacatgcatgtgacctgcctaccccagggccaggagtggggtcagcccattacaaaggcttagactgaaaaagaggagagagggacggccttaccagatatggatgggacatggatgctgataggcaaaaccaagactggctctaataaggttcctgtcttacttatgtcaatgccctccagccagagaccaccaggagtccctctgtggtcaaacgaagttgggtttggtggctctttacacccaccatggggagctgtggggcttctcagcaagaaagtatgatggggggctaggcgcggtggctcacgcctgtaatcccagcactttgagaggccaaggtaggtggatcacatgaggtcaggagttcgagaccagcctggccaacatggtgaaaccccatccctactaaaaatacaaaaaattaatttggtgtggtggcatgagcctgtaatcccagcaacccagaaggctgaggcaggagaatcgcttgaatctgggaggcggaggttgcagtgagcctagatcgtgccactgcacaccagcctgggcaacagagcgagacctcatctcaaagaaatatatatatatatatgactggtggcttattgtaggatttgggcttgtgttaggtgatttggaagatgattcagtgtagtgagttttgctgtggattggatgctgtcagaatatgggggtgactaggtgattgggggtcttaatcattttgatctaggtggtgggaggaagagaaggaggctgttgcattcattggcagctgtcattcatctgagccggcgaggggatgcgtggtcatttttgtggtttgcacagtgaccttgattttgtctgtgctcaggcaagattatggagcgagcttggttttgtcctactccatcgtggtcagagtggccccatctgatatgagcgttctgtgagttttttttattattattgttgttgtttattgctttttttttttttttttttagacacttgatctctctatgttacccaggctggtcttgaactcctgggctcaagcaatcctcccgcttccacctcccagagtgttgggattacagacgtgagccattgtccctggccatttctgtgagattattatttttacttatttatttatttttgagatggagttttgctcttgttgtccaggccagattgcaatggcgcgatctcggctcactgcaacctctgcctcctgggttcaagcgattcttctgcctcagcctcccgagtagctgggattataggcatgcgccaccatgtccggctaattttgtatttttagtagagactgggtttctccatgttggtcaggctggtctcaaactcttgacctcaggtgatctgcccgctttgtcttcccaaagtgctgggattacaggtgtgaggcactgcgcttggcctgtgagattatttatactcctcagaacacgatggctagccctgagtgctgacggcagttggggctgctttatttctttctcactgatgaggaaactgaggcccaggccatggagctgataagagggtcttgaggctggtccgtatctctccattaagatgttctcctcctttatctggagcccacagccctttggaatcttggagcattattcgaaaaggaagaacctgtctggcttgcaggttgatggggaagtttctcaccctagccgacctgggtcacatcctaaatgcaaatgctgaagtttccctccacgccctggtgtggacatcctgaccctggctcagctccctcccatccccatctcacctccaggggaggttgttgggaccctctccttcaccttagctaggtttgtctcaggaagctccctttgccctcgccttgtgaattctcggctcctgtgacaatcagcagctccgagaatacagcagaggggccagtgtggggagtgcgagtgtggggagtgcgttgtcatggggatgggaggcagcgcttcctgatgggtggtccagagtgtgagctcctgatgggccacttcttagctgatcctagggcaatccttcccctctctgaggctcagtctcttaatctggaaaatggggctgataaggacactggcctcataggatggttgtgagaatcaaatgacattgtgtcagagtaagggctgggtacatggaagctgttttttttttgttgttgttgttttgttttctaagacagagtctcactctgttgcccaggctggagtacggtggcactatctcggctcactgcagcatcaacatccctggctcaagtgatcttcccacttcagcctcccgagtagctgagactacaggtgcacgccaccatgcccagctaatttttgtatttttggtagagatggggttttgccgtgttacccaggctggtctcaaactgctgacctcaagtgatctgcctgcttcggcctcccaaagttaggattacaggtgtaagccactgcgcctagcaagaagctgttgttattgtaactattattcagttggataccttgtggtttgagtcaacatcagcgaatgtccagaattacagaaatcccgcattccacatagggcagtgtctcacttttatgatccagtaagaaatacacagccaggcagtggctcacgcctgtaatcccagtactttgggaggccaaggtgggtgaatttcttcagcccagatattggagaccagccagcgagactctatttctacaagaaacttagaaaaaaaattagccaggcatggtgttgtgggcccatagtcccagctactcaggaagctgaggcgggaggattacttgagcccaggagttggaggctgcagtgagccatgatcatgccactgcactccagcctgggtgatagagtgataccctatctctaaaataaataaataaataaataaacacacttacctcatgactcacagttcacatgcatacatgggcacacaggctaacacagaggttttataaaacaatacttccaggctgggcgcggtggctcaggcctgtaatcccagcattttaggaggctgaggggggcggatcatgaggtcaggagttcgagaccagtctggccaacatagcgaaaccccatctctactaaaaatacaaaaaaaaattagctggacatggtggcacgcgcctgtaatcccaactactctggaggctgaggcaggagaatcacatcaacctgggaggtggaggctgcagtgagctgagatcaagccattgcactccagcccaggcgacagtgagagactctgtctcaatcaaacaaacaaacaataccaaacaacaacagcaacaacaacaaaaatactcccccgaccttgttttgcattgtgatattttccgttccttctattctattccaccaaacaaatgctggctgtgacccattaaattaacttcactgttttctagtcgccaactagccatccaggaggaaggtgaactatttaaggaaaaagagggagttcggggttaagcacagtggctcatgcctataatcccaacacttcgggaggccaagtggaaggattgcttgaggccagccgttcaagaccagcctggccaacatagtgagatcctgtctctattttaaaaagaaaaaggagtgcagataaccactgggattgatagataatgcaacagaggatgacagagggaacctagaaacatggtttaagaaaagagaagttggccggtggcagtggctcatgcctgtaatcccagcagtttaggaggccaaggcgggtggatcactggaggtcaggagtttgagaccagcctggccagcatggtgaaaccccgtctctactaaaaatacaaaaatgagccaggcgtggtggcgggcgcctgtaatcctagctactggggaggctgaggcaggagaatcgcttaaacctggaggtggaggttgcagtgaaccgagatcgcgctactgcactccagcctgggcaacagagtaagaatctgtctcaaacacacaaacaaacaaaaaacaaagaagtttcatttgactcagttctgacataagcacaattttcactcaaatatacagaatctgagatgctctgaatccatccatcattcagtcaacaaatcactacattcactaggctacagctctgggctccaccctttgctgggcagtgtttgggatagggtgtgacagacccaggtcctgcccttaaggagctctcagtccagtgggggagacaggacaaggcaatgacaacacagagtagtcagggctaggatggggaagcagagaagcctgagagggtcgaggaggagcctgctccagccttggggtgtcagggaaggctgcctggaggaggagccacgtgacccggcatctgatgaagtcacaccaaggacagggtaggtagcccgcaccatcctctcttgggcgccccttggcttgtgaccaatcctggatgctccccttctcctggctcaggctaccagccctgcgacccgcaggtcatctgcaaccgcgtgaaccacgtgcacggctgcctggcggagctgcaggagcaggcagcgcggcgacgcgcggagctggaggcttcgcggagcctgtgggcgctgctgcaggagctggaggaggccgagagctgggcgcgcgacaaggagcgtctcctggaggctgcgggcggcggcggtgcggcgggcgcagcgggcgcagcgggaacagcgggcggcgcgcatgacctgtccagcacagcgcgcctcctggcccagcacaagatcctgcagggcgagctgggcgggcggcgagcgttgctgcagcaggccctgcggtgtggcgaggagctggttgcggccggcggtgccgtcggcccgggagcagacaccgtgcacctggtaggcctggcggagcgcgcggcgagcgcccggcgccgctggcagaggctggaagaggcggcggcgcggcgagagcggcggctgcaggaggcgcgggcgctgcaccagttcggcgctgacctcgacgggctgctggactggcttcgcgacgcttaccgcctggcagccgccggtgacttcggccacgacgaagcttccagccgccgcctggcgcgccagcaccgcgcgctcaccggggaggtggaggcacatcgcgggcccgtgagcggcctgcggcgccagctggcgacactcgggggtgccagtggcgcagggccactggtggtggcgctgcaggtgcgcgtggtggaagcagagcagttgttcgctgaggtgaccgaagtggcggcgctgaggcgccagtggctgcgggacgcgctcgctgtctaccgcatgtttggcgaggtgcacgcgtgtgagctgtggatcggcgagaaggagcaatggctgctctccatgcgtgtgccggattcactcgacgacgtcgaggtggtgcagcaccggtgagcgcgcacatgtgggactccggggtccccttcctcatgcacccagtctcaccttcattggctcaacagttcccatgtttgctcagctggaactaggagttccaatccctgcttcacccatagccagctttgtgacagttctgcaacctgcctaatcttcctgaacctcagcttgcccacctgtataatgggggtgatattagtccctacccaggcttgtgatgaacggtaaatgagttcatacatgcagaatacgaagcaaatgcctgggggtagaggaagcattcccccagcatttgctcttgttacccaggcttacattcgccaagcatgaaatcaacgacctatgcttctacagggacacctcagcctggcccctctgctgggaggcctcccattgcttctgcataaatgtcacctccctagctactaaaatagctctgactcttgtgattttccattgtttcatcctgttttacatttctttgtagcacttaccatcccatgacatattgtatactgacttgtctgttggctgacttagcaatgagttgttcaattagtgggtgaacaatgcctattccccctctgcaccactctgtctgagcatcttattcatccatacattcattcagcaggtgtttactgagtgcctatgcctttctaggtcttgtgctgggcactgctggaaacacagggctgctccttgcccctactgtgcctgcagttgcccagttctttgaaacattgatttaaagatgggaggaccatgtctagcttaaagtagacctcagtggctgccatgtggagggcaggttggagcgggtaagagttgtggctgggaacccagagaggcaactgggctggggacccagatggagcggaacaagattagaccagggcgggaggtaagtaaacaggccatggagactgatgggctggagcgattttccaaaacaaagcccagggctctggcctggcagatgacagtgctgtccccaacatgggggcccagaggaagaacaaatttgagtcaggtgggtgtgaatagccccaagaaggtatacagtaggctttgaggtcgaagacaggttcaaaaggtaagaggttgaggctggagactgaggtgtgactgtcatgagttcaggggcaaagaccaaggctgtggggctgggtggaatcattgaagaagggtgtgaaggaaaacccagagggctcagggtggagttgctgctgaggaatctcacatttaaacatcaggtagaggctgggcgtggtggctcacgcctgtaatcccagtactttgggaggccaaggcaggtggatcatataagatcaggagttggagaccagcctggctaacatggtgaaatcccgtttctactaaaaatagaaaagttagctgggcgtggtggcgcatgcttgtaatcccagctacatgggaggctgagacatgagaatcgcttgaatccgggaggcagaggttgcagtgagccacaatcgcgccactgcactccagcctgggtgacagagcgagactctgtctcaatacatacatacataaattaattaaattaaattaaataagttaaattaaattaaataaaataagcagcaagtagaagagaaggagcccacaaaggaggctgaaaagaagggtggattgagaattaggagtagaaccagtagaaggtatttcataaaaccaaggtccgcagggttcgggtgtctgagcatctccatcctcctgcagattcgagagcctggaccaagagatgaacagcctgatgggccgcgttctggacgtgaaccacacagtccaggagctggtggaaggaggccaccccagttcagatgaggtgcgttcctgccaggaccacctcaacagcaggtaggagggcctggggctgggagtccctcccatccttcccttccacactcacacagccatggacagcaagatgtgcaatctcaaacccctggaatcataatggccacccgataaatcaacaaaatgttgaccaaaaatcataatccctgatactggtgatgacgtggtaaaattaaaacaacatttcagttggctgttcatttatttgtccagaaagaatgtattggatatctacaatctgccaggagtattcccaagcactttatatacctttctaaagtatcccaacattcttccgggcacagtggctcatactgtaatcccagcacttcaggaggctgagatgggtggatcacttgagctcatgaattcaagaccagcctgggcaacatggtgaaaccccgtctctctctctacgtgcgcgcacacacacacacacacacacacacacaaaatatatatatacacacacatatatatacacacatatatacgtatatatacacatatatacgtatatatacacatatatacgtatatatacacatatatacgtatatatacacacatatacgtatatatacacatatatatgtatatatatatacacactatatatatgtatatatatatacaaaatttagccaagcatggtggtgcacatttgtagtcccagctacatgggaggctgagttgggaggatgccttgagcccaggaggtagagattgcagtgagcagagattgtgccactgcactccagcctgggcaatagagccagaccttgtctcaaaaaaaaaaaaaaaaaaattcccaatatcccaatttccatagtaaagatcctagaattcagaactctctctctctctcttttgagacaggatcttgctctgttgcccaggttggaatacagtggcatgatcatggctcattgcagcctccaacacctaggctcaagcgatcctcccacctctgcctcctgaggaactgggactacaggtgcatatcaccatgcccagctaattaaaaaaaattttttttgtagagacagggtctcactgtgttggccatgctggtcttacaactcctgggctcggctgggcgtggtagctcacacctgtaatcccagcactttgggaggccaaggcaggtggatcacctgaggtcaggagttcgagaccagcctgaccaatatggtgaaaccccatctctactaaaaatacaaaaattatccgggcatggtggcatgtgcctgtagtcctagctactcaggaggctgaggcagaagaattgcttgaacccgggaggcagaggctacagtgagccaagatcacaccactgcactccagcctaggtgacagagcaagaatctataccaaaacagacaaacaaacaaacaaacaaacaaaaacctcctggcctcctcccaccttggccttccaaagagctgggattacagtgtaagctactgctcctagcccagaactctttaagataagtaacaaactaatatcagtacctctggaatactaccagcaattctcccagtgcaggtggggttcatagatgaagatacaagtccaaaaaggtgaactccttatccaagattactcagtctataagtaggagtcaaatacagttctggctgaatcctgagctgtagctgtttatctaatatatccagtcttcctggtaacactatgaggtggaaactaccccacattagagaggagaaaactggatctcagagaggcgaagatggaggcccaaggttacacagcaagttaggggatcaaaccgggctttgaagatggatatgtttgacttcaaagactgtgctctttttttttttttctttcttgagacagggtcttgctctttcgcccagactggagtgcagtggtacgatcatggctcactacagccttcaccgcccccgacccgagctcaagaaatcctcctgcctcagcctcttgagtagtgggactatggatgcacaccactgcacccggctaatttttgtattttttgtacagatggggtctcactctgttgcccagactggtctcgaactcctgggctcaagtgatcttctgccttggcctccgcaagtgctggaattacaggcatgagccactctgccccacccaaagactacgctcttgactctgtgctgcaagattccaatatccagggattttaaaacctctgtagccaagaccatcgcaaagcatccaggcctaaaaaaataactacaatcataacgatttacagcatgtagagagatctatatgccaagtgctttagccacatgatctcgttacacactcaatgaagtggactttattatccccattttccagatgaggaaactgaagatcagagaaggaaatgatttgcccaaggtcacatggcaaatctggccagagcagaacttgaactcgggtctgcctgatttcagagtcctaatctctgtcctcatggtgtgtccattctagagggggcagaaagacagttaaatacactaataaatggacaagatatttagagaatcataatggctttatgcaagaaacaggcagggcatggtggctcacgcctgtaatcctagcattttgggaggccgaggcaagcagatcacttgaggtcaggagtttgagaccagcctggccaatgtgatgaaaccccatctctattaaaaatataaaaactagccgggtgtggtggtgcacgcctgtaatcccagctacttgggaggctgaggcaggagaatcccatgaacctgggaggcggaggttgcagtgagctgagatcgtgccactgcactccagcctgggcaacagagcaagactctgtctaaaaaagaaaacaaaatttaaaaaacccaaactattgaggaccccaagagcttgttttagtgggtcatatctattgctatttactatattagaacttagtactgagaaaatttaaaatgtttttatttttatttatttattttgagacagggtctcattactctgtcacccaggctggagtgcagtggcacaatcatggctcactgcagcctcgacttcgcaggctccagcaatcctcccatctcagcctcccaagtagctgggaccataggtgtgcacccccacgcccagctaatttttgtattttaggagtctcaccatgttgcccaggctgctctccaactcctgagctcaagcgatccacctgcttccgtcttccaaagtgctgggattacaggtgtgaaccactgcacccggctgagaaatttgaaaacattatttaaaaataacaatacactgggagtggtgcgtgcctgttagacctgtgaggctgaggtgggaggaccgcttgagcctgcgaattggaggcttcagtgtgccataaacgagttcatgaatagccactgcgttctagcctgggcaacatagtgagatctcacgtcttaaaaaaatttttttaaatctaaatatctaacgtgttaatataacttttttattaaaaataacttttcataacacaaaatgtactaagagtggcattgtttcgtacctttgcaaatctctttaaagtctggtttaagagatggcagctgggcttctcttaaatcagagtcggcttctgctctcagtctctcctgccgcctctggaaaactccactgaacactcgggaaagaatgagagtgaaaaagcaaatggcgtcttaacacatttttatgaagatagttttgtcctctatcagattacatgttgagaatggctgccctaagcaaaagtgctgcgtagggttccattttacaccggcagaaactggagaaactttctgaggtcacacagtggctgggtggcttgggcctggattctaccctgggtcggcgggccctccgcgcccaagaggagtccctgtcctcctcaagtcactctctttcccctgggcaggtggaaccgcatcgtggagctagtggaacagcgcaaagaggaaatgagcgcggtgctgctggtggagaaccacgtgctggaggtggccgaggtgcgcgcccaggtgcgtgagaagcggagagctgtggagagcgcgccccgggccggcggcgccctgcagtggcgtcttagcggcctagaggccgctctgcaggcgctggagccgcgccaggcggcccttctggaggaggcagccctgctggctgagcgcttcccggcgcaggcggcgcggctgcaccagggcgcggaggagctgggcgccgagtggggcgcgctagctagcgcggctcaggcctgcggcgaggcggtggcggcagcagggcgcctgcagcgcttcctacatgacctcgacgctttcctggactggctcgtgcgcgcccaggaggcggcgggcggcagcgaggggcccctgcccaacagcctagaagaggcggacgcgctgctggcgcgccacgctgcgctcaaggaggaggtggaccagcgcgaggaagactatgctcgcatcgtggcggccagcgaggcgctgctggccgccgacggcgcagagctgggcccgggcctggcactagacgagtggctgccacacctcgaacttggctggcataaactgctcggcttgtgggaggcgcgcagggaggcgctggtccaggcgcacatctaccagctcttcctgcgggatctacgccaggcgctcgtggtgctgcgtaaccaggtgcccactcggggtgtacatttcggagagggagagtccgaggccgcggggggattgcagggacagggacatgcgggggtggggaggagggtgtttcctgggaccactgggttctgaggtgggtgggaggtgagagagtatccggaatggataactgagtttgtggaacatccagtgtgtgtggaagtgtgtatgtaacagaatttgaggagtatcatcagtggggtaggttggtgtcttatcggaggtgacagtttgtgggctatcccgagtaagtaatgcacgaggatatttattggagtggcttcctgggttcgtggattatctgaaaggaaataagactatgaggttgattggcgatggttaaatggggttcaaagaagatcttggtatggataacaaaggattaggattatggaggtaggtaacaggctgaggggttattggagtcagtcagtgattgtggattacatggtgtggatggctaaattagcacaatatcttcatttctgggaatgacaactatggattctctggagagagtaactgtgtctgtggcatgaggaaccaagtgcagtggttatctggggacagccaatccagttgggagatcactctgggatgggaaccaagtttgagaattttggcaagatggaacagccagttttcagattgtccagtgtttggggatcatgttagaaagggtgcctgcctgtactggttatataagggatgctgacccagtttgaggattatctacagcagtggtccccaatcttttttttttttctttagatagagtcttgctctgtagctaggctggagggcagtggcgtgatctcagctcactgaaacctcagcctcccgggttcaaacgattctcctgcctcagcctcccaagtagctgggactacaggcgcgagccaccatgaccagctaatttttgtatttttagtagagatggggtttcaccatgttggccaggatggttttgatctcttgacctcatgatccgcctgcctcggcctcccaaagtgttgggattacagacatgagccactgcaccaggcccagtccctaatctttttggcaccaaggactggttttctggaagacaattttttccacaaaccggtgggaaaaggaggaatgttttcaggatgattcaagcgaattacatttattgtgtgctttatttctattgttattacattataacatataatgaaataattataaaactcactataatgtagaatcagtgggagtcctgagcttgttttcctgcaactagacgttcccatctagtgacatctaggggtgatgggaggcagcgacagatcatcgggcattagattctcataaggagtgtgcaacctggatcccccacatgcgcagttcacaatagggtttgtgttcctatgagaatgtaaagctgctgctgatctgacaggaggcagagctcaggcagtaatgctcactcgccccccctccacctcctgctatgcggcccagtttttaacaggcgatggactagtacccctctgtggcccagggcttgggaaatcctgatctagggagtggaggagaaaggacagagagcccctgaatcataagattactaaatatggagctgaagtggccttgagagaccctttctgacccacccatttaaaaaatagagacaggatcttgctatgctgcccaggctggtctccagctcctgggctcaaacagtccccctgctttggcctcccaaagtgctgggattgcaggtgtgagccaccatgcccggccctgacccactcattttactagttagaaaactaaccccagagggaaaagaacttccttgagttcacacagtacccagtttagttgtcttctttttttgagacaggacctcactctgtcacccgggccagagtacagtggcacgatcatgactcactgcagccttgatctatggggctcaagcaatcctcccacgtcagccctccaagtagctgggactacaggcacgtgccaccatgcctggttaattttttgtatttttagtagagatgggatttcaccatgttgcccaggctggtcttgaactcctggggtcaagtgatcctcccgcctctgcctcccaaagtgctgggattataggcatgagccaccgtgcccagccttcagtcttcatagtaaccaattttttttttttttttttttgagatggggtcttgctctgtcacccaggctggagtgcagtggcgtgatcttggctcactgcacctcctccgccttctgggttcaagcgattctcctgcctcagcctcctgagtagctgggataacaggtgtgtgccactacacccggctaatatttgtatttgtagtagagatgaggttcaccatgttggccaggctggtctcgaactcctgacctcaggtgatccacccacctcggcctcccaaagtgctgggattacaggcatgagccaccatgtccggcctaatattaaccaaatatttactgagtgcctcctctgtgctgggcgctattttggggctgagcacacctcaggcaacaaaatacaaaatcctgccctcatgtggttgacattctagtatgtaggggaggagagagtaaacaagtcaatgcatcgctaatattgccaggtacatgctatgagaaataatacaggagggttggctgggtgtggtggctcacgcctgtaatcccagcacttcgggagtccaaggcaggtggattacctgcggtcaggagtttgagaccagcctggccaacatggtgaaaccccgtctctaccaaaaatacaaaaaaattagccgggcatggtggtatgcacctgtaatcccagatacttgggaggctgaggcgggagaatcacttgaacccaggaggtggaggttgcagtgagccgggattgcaccactgcatccagcctgggcaacagagtgagactccatctgctccctccctgccaaaaagaaataatacaggagggtagtgggatagggctggggtgggagttgataaatttggcaggttggtcagagacctgaagaaagtgaaggagccagccatgggggtatctggagggacagactcccaggcagaagcaccagcatgggcaacagccccgaggtgggaccacaactggaatgttctatgcttgcaaggttgcggggagtggtggcaagccaggctggcagcctctcccaggtcctggaatggaatgaggctgacctttgcaccacgctccctcctccccaggagatggcgctgtctggtgcggagctcccgggcacagtggaatcggtggaggaggccttgaaacagcaccgtgactttctcaccaccatggagctgagccagcaaaagatgcaggtggccgtgcaggctgcagagggcctgctgaggcagggcaacatctacggggagcaggctcaggaggctgtgacccggctgctggagaagtaggtcccctagacccatccaccccagggagggggcagaagatggggcccagcataggggagtggtgtgggaggccagggtcccactcctttcatcacgatttctgcttctctggggctctttcctatttctatttaattccatgttgtcttagatttgatttaagtggatttttttttttgagacggggtctcactgtgttgcccaggctggagtgcagtagcacgatctcggctcactgcaaccctcacctcccaggttcaagtgattctcctgcctcagcctcccgagtagctggggctacaggcatgagccaccacgctggctaatttttgtatttttagtagagacacggtttcaccatgttggccagactggtcttgaactcttgaccacccaccttggcctcccaaagtgctgtgattagcggcatgagccactgcacctggccttaagtggatatattgtgaaaaggtaacctgaggctgtcaacccaaaagatacagaaggatatacaatgaaaggtttctttcttaagtctgccctgagcatgggatagctggtcctgttgttaaaatgttaggctgggtgcagtgactcatgcctgtaatcccagcacttcggtaggctgagacgggaggattgcttgtgctgaagagttccagaccagcctgggcaacatagtgagaccccttctctaaaattaaaaaaaaaaaaaaagctgggcgtggtgatgcgtgcctgtagtcccagctactcttgaggctgagatgggaggactgtttgagtccgggagattgaggcagcaatgaactgtgatcatatcactgcagtccagcctggatgacacagcaacattctgtcccccctccaaaaaaaaaatgtgttaacttacttccctagatgcctcattatccatcctgctcttctgcaccctccttgggaacccccagacctccccagatccagcagctagaggccaggcacaggtgtgttccagctttccagatgggacagtgtcccctgccaggctggttgtcaaatattttgcataagcacctcttcctggccccagccactctaggaagcatgcaaagtgagtgtctgcatgtctctgtgtctctctcatctcttgaacctcattgttctctgcttctgtcgccatctgtctcttgccaccactctcttgtctgtccttgcactaatcaagcgaagatatttattgagcatctactgtgtgccaggcactattgtaggtaggcactgaacaaaacaacaccaccacctccagccatcatgggaagtcctttctcatcttccagacccagttctgtctgtcattagagctgtttctgctcctcctggtgaccctaaatttctcctctcaggctctctggctctctccggcatgatccaggccagaaggggacccagtacccctccttctgtcttcccatctcctgacagaaagcatccctggtcacttcactgtgccacccccagccccaggaccgctaccccttttctgtttacggctcagacatcctttccctagatttatctggggcaaggcagcatgcttctaaaggaaacttttatgggaattctgttcttgaggatgcaaactcatcatttagtgcccccttttccatccaggcctggatccttcctttgttccactttttttttttttttttttgagacagggatcttactctgttgcccaggctggagtgcagtggtgcaatcatagctcactgcagcctggaactcctgggctcaaccaactctcctgcctcagcctcctgagtagctggactataggtgtgagccactgagcatggcctgttccacatttcttgagcacctgctgcatgccaggctcagcaaaacgaggaggaggagcccgggggactgttcattccatgattcattcattcattacttttcagtcattcattaattgctcctttcactctattgtttattcactcatcctccagtcaattaaacatgtactgagcccgtgctctgtacggagtgggggtgtgttcacagaaatgaccaggacagaacatgattcctgcctcacagagctcgaacgttatctgacaaggatggcccagaatgctcggggctgggatggaggaagtccaggcagaaaggtcagggcccggatgggagacgtgcagccgctgtgggagaggcagcatttgtcccaggcttgtggtgggtgaggtgtggtcacagagggattgagacggactaatctctgcaccttcccaccatcccagtcatttatttgtctagggacacatttcccaccctgtgggaggagtgggaggagtgggaggagtttccacatccgccaagggggcagagccatacagagctggggactggggccctggggccctgggggtcttagacctggcttcacccctgaatccgtgacattcagggcaagtcacttagagcttcagcttgcctggcccctcacctggaacctgtgtgtgaggtgctgttctttttttttttttttttttttttgagatggagtctcactctgtcacccaggcaggagtgtagtggcgcgatctcgcctcactgcaacctctgcctccagggttcaagctattctcctgcttcagcctcctgagtactgggatcacaggaaagagccaccatgtccaactaatttttgtatttttggtagagacagggttttgccatgttggccaggctggtctcaaactcctgacttcaagtgatccacctgcctcggctccccaaagtgctgggattacaggcgtgagccaccgcgccggccgctaggtgctgttcttatctgcgttttgcatgtgaggctcagaggggaaaactgacttgcccagagtcatggccaggaagtgccacagcctagatttgaaccctgttgctttcttttcttttcttttttttaaagacagggtcttgctttgttgcccaggctggagtgcagtggtgcgatcactgctcactgcagcctcaatctcctgggctcaaacaatcctcctgcctcagccttctgagtagctgggactaaaagcatgtgccaccttgctcggctaatttttcattctttttttgtagagatgaagtctcactatattgcccagggtggtttcaaactcctgggctcaagcaatcctcctactttggcctccccaaagtgctcggattacaggcgtgagccatcgtgcccggcctactctgttgttctttcaccctcatggagactcagggtcttcctcatctctaggactgatgcttgacagtttggctgctgaaggcctggaaagattgatttcagctcaatttcagaggcattttatctttcctggctcctaagctaagttgggcaggaggcagtcagtgcttcgcttgcttgtctcaggcccttcctgttccttctctctggttctgtctctgcaactgtctcctatacactctgtctctttgcttccatctatccatctatttctgtatctctgtttcctgctccctctctgtttttctctccgtttttctctccctccatctgcacctctctaaccctgtcttttctgcctctgtctttcacagatactgtacttttgtttctcccatcttttttctctctgccactgtgtttcttgcattcattcatttaacaaatataagtcgagcgtgtactgtatgccaagccctttttctaagcattggggacacatctatgaacaaaacagacaaaaatccctgccctcatggaaatgatatatcctagcatgggagacagccaagataaataagtaacatatagcacgtgttagattgcgttaagtgctaaggagaaaattaaagaagggaagaaagccagaaagtgttggggagtggtcaggagggacctcacgaagaaggtgatctttgagtagatgttgggggaaggagcattcccagcagagggaacggctagtgccaagggcctgaggcttgctcaaggcacagcgagaagggcagtacagttaccacagagtgagggggaagagtgcaaggagaataagagtttggaaaggtgggggtgtggggcctggtaggtcagaaaggcctctgagattggccgagtgcaggagctcactcccatcccagcactttgggaggccaaggcgggtggatcacttgaggtcaggagttcgagaccagcctggccaacatggcgaaaactcgtctctactaaaaatacaaaaattagccaggcctggtggtgggcgcctgtaatcccagctagttgggaggctgaggccggagaatcgcttgaacctggggggtggaggttgtagtgagccgagatcacgccactgcactccagcctgggcgatggagcgagactccatctcaaaaaaaaaaaaaaaaaaaaaggactctaaggactctcatggagaccctgggaggatctctaaggactctcatggagaccctgggaggatagtctcattctctctctctccctgggggagacagatagcaacaggacagggatgcatgggagcccatgtgggatgccccagccccatccaccaggcctcttgggcactttgccttgcactgtgggcaggaggccagactgcccggggcccatggtcccagccggctccagagtggtacggcctgggtccagcctggtcagttcagtcaggccaagggcctcgctctgcctgcaggagtgcccacttcagcttctctgcgactctgctgtcatctctccccacactctgctctcttccctctctccaactctgcggccccctggtctgtctgtcgtctgtggggctgtcttttcctggtggcatttgccactcctctgcctgtctctctctgggctgtccctgaccggactcctcctgtcactttccctctctctgcctcctctctttcgtcgtctgctgctccctgagtttctttctggctctgccttgctccatctcttttctcgtctttttttattctctctctcgctctctttctggtgtctcctctcactttctcgtttgttttgttttgtttttgtccctaggtatgtctgtctttacttctctgttatctttctctctggacttgcctttttttctctccgtctatatctctttctttctaagtgcctgtctctgcctctccctttctcttcctctgtctgtctctctctctgcccttcttcagccccgtccctgcgtccctggctttgccccactaattcctccctctctcttacatattttccacgcccttcttcccctacccagcccagtgccctcacagtcctactgccagcgccgcaccccccaacccggggcctttccccagcccttatctccccatccccaggaaccaagaaaaccagttacgggcccagcaatggatgcaaaagctacatgaccaacttgagctgcagcacttcctccgagactgccacgaggtaggaactccaggtgtgctggggacggagacatcccctttagtcgggagggaagtgcttctcggccgaggtgggggtggggacgccccgtctaagtgggtcgcggagcgatgctcgctctaagccgccagggggcgcgcggagccgggtctcagtgcgcatgctccgcaagtccctgcccgcccacgccgactccgggaaacgaaggaggggccccgggcgcccctggcaaccgcgcgtgtccgcgcctacgggtcccgcggggacgcgcgctgatctcacctttctctcctgagatttgtgagaatcgctctaccccaggagaggggcggggcgggcggtggggataagggccgagggccgtgggggggccagcggccctgcgccctcctgcagccagcgatggctctgaaccaagccctcgcccctttaaaggtgttcagtaatcaagccccttcccttagggatgatctgcacacattagggacgatctcccctaatccgagatggtccaggcccccttccttattagtgacggttcaggagacctgctgtcttcccctccttcccttgcattccatagaaacgattctagactttggccacattagagatggcctagtaaacattttcctaaaccctaaacagagctaggcctggccctgagcccctccatctgtgtgacccaggatcatcccctcctccatcatcaccccgtacctaagtttcttccaaccaaagctggttcaggaaccaggtctaacccctaaacccctcagcctcaattaaagacgattcgaccctcccccctatgttgaacacccatgggagattgttctctccgcacacggaataaacaagggcctccataccgtgcccccctcccccataactggggtaggccgggacttgagccactggaggaaccccctgttccccctcgcccccactggagattgtgagatgttccaggtcgccctcccatatcccctgtccacatgtggtggccaggagcccgagcttcttcccattagagatggttcaggaggcccccacccagcccctcaccataatccccactcccttagtgaggcagtccaagccccaggcgctccctcccggcattagatttggtccaggagcaccccccatccctcatgagattgttctggatcaggcagcaatcatctgagatggcgcagaagccccccacccgaagccttggggcgagtggtggttcctcctgcacccccacctggggccccgcaaagaggcgggcagggaggcaggcagggggcgcacgcgggcgggcgcgcggccgccgcgcgggggcgagggagggggcgcgcggccgccggagcctcagccttcgccgccgctgccgctgccgtcgcagttgaggggcgagcacccgcccgcccgctgcagggacgccccgccaacgccactgccgcttcaggtctcgggggcgcccaggggagggggttggcgcgcaccccgcggacgcagacaggggagggggctcgggcgcgtgcccgcccgtcgtggccgcgggagggaggggcggggcggcgcgggggcgggccgggcaggcgcccggacccccaccctgggggaggggcaaggacgccgggagctgtccgcggtgctggcgcgggcgggactgaggggccggcccccaagggaggggagcgaagcggggggacttctaagaccacttctagggtaatctggatttgccctaagggttcagggcgtctcagcctttcgagggggggctcttctccgggtaatggggcatctaagatttgccctggggttgggggtttctcaaccttttggggggtttctttcttgttttgggaggatctgtatcagccttggatgatggaggtgaatcacttttggggggctctgccttggaagatgaggggccttggattttctctgggtctagggggctctgactttgtggggcttttcctgggttgttggatagtctggttttgccctccatcatgaaggaatcacttttgagggggctttactttgaggatggggtaccatctctttaagggctctgctttcactgcgggctgtggttgccgttggactcttccctgcacgtcgggaacctgtgaattgagttggggggttcagcactggacttggttctagtgtgtgtatgaaggagtgtgatgctgtcctggacccctggggagcacatgctcaggggacatgggctggggtttggccggctggggatctgggatttgtccttggctatgactgcatttgcctcccgggaccgcggagctggagtccagtgtttgtttttttttttttttttttttttttttttttttttgcaggagggaggagggaggatcttgtgactggagtggggaggagaaaggggaggagcaaactgtttcaggtgccaggtttggtcatgagtggggaagttctggcttggaggataagtctggttttttactggagggggttgggggaggctcaaaaagcagcctgtgattgatcctctctagtgccgtgagaggggcccactcttggtgcttgcgttttggatgactggttttgttggtgggtaggaggactagaactggctttagttgtaggggtgggggtgctggccgggcttgggaggtccgatctgatccacgatggagagtctgtggctagattttggggtagactggtttggagagccagaacacagctttgtttttcacatttggctggggttggctttggttgagggctagaactggtcatggtttggggatctatggtcttagagtcccagggctagaactggggagccctgtgggctcattaggggtgctagatctcgattatggaggatgggtctactccagattagagggttagtttagagagagctagagttggctttaattgggaggttgtttggggggtttatctggccatactggaggaactggggctagatatgggggcttcatttgatacccttgggaatgggttgaggctcttgaattggtccttattggggggtggctaagattgaatgaagtgtctaagtgttgctatgggaggggtggtcctggggatgaattgggagttagctaaattgggttggagagcttgttttggggggggtgatctgtccccaagtctaagaggctgactggccctgccttgggggcttgtggggagttgaggagggcttccctcaggacaggggacaggggagcaaaggattgggcattctggggacccttccatccatcctctatccaggaaagagcttgagctgcacccacccccaatataaaggcctcacttgcaaaggttttttcatcctttcctattccttccacccatacaccctagcagcccaggccctgaacctgggacttcctgaagggatggggggctgtggcaggttgaggggaccagctgagccctcctgccctgttctgcacagctggatggctggatccatgagaagatgctgatggcgcgggatggcacgcgggaggacaaccacaagctgcataagagatggctccggcaccaggcattcatggccgagctggctcagaataaggagtggctggagaagatcgagcgggtgaggaagctgatggcccctctgcctgtgccaggtgcaggaggcctccagggagcccacgtctcacctgctgcacccgctgctgccatcctgctggtcttacacctctggactgactcaaatcagctccagatctgctcctagctatgtggctttgagtgattcatgtaacatctttgagcctcaatttgctcatctgtaaagtggccagcatctcttctgaatggtgcctgtatcctactgtttgttaaatatttcacttcttaatataacctcctctaccaggttccttccataccatttggggcatttaagatggaaggttggggagatgggctgggacagaccctgggaagcccagggttaaagtaaactttggattcttagagccctgggttctaactgtgtctatgcctgttaccagctgtggggccttaggtaattgtgttaacctcttggagcctcagtttgctgttctataaaattaaggaaataataaatatagctacttcctgggctctgtgcacataaagtacttaacacaaggccacgcacctaagagctgtaattactgtggtcttgttacttttaatacttaatgttacctaagtagctctgggccactaagaaccttgacttcagtcttggagggactgaggtagatatttgctctaagcctcaaccctcagaacttccccctcctctggctgaacccctagacctgtagccctggatatacacacttttctgactcacacagagacacccatgttggccttaaacccttaaatggtcattgatgtttcataaatggtggcatatggcgaaggcagtcttcttgactttgagtttaatggaagttcattctctccctgcctctctggctccctctatctttctttcctgtctgtctatccctctatccttgtctttcttacggtcctctccccatgtttctgattttctgtgcctgtctctctgttgatcactctgtgactgtttgtctctccctgactccttcccatgtctctgtgtccatctgtctctccctgtatctttctgtctccctcccctcacttctgtctgtctgtctctctcttcttgtctctcttccttggttccttccatttctgggcctatctctgcatccacccctcatgtctctctctccctatgtgtctcccactccctgcctctgattctcttttcacatccttccctgtgtcctgtcactctcccacacttctctgattctccccaccatctatctatcttctccatctcctgccatccacccacttggggcaggagggccagcaactgatgcaggagaagcccgaactggcggcctccgtgcggaagaagctgggcgagatccgccagtgctgggcggagctggagagcaccacccaggccaaggcacggcagctctttgaggccagcaaagcagaccagctggtgcagagctttgctgagctggacaagaagctccttcacatggagagccagctgcaagacgtggaccctggaggagacctggccactgtcaacagtcagctcaagaagctgcaggtatggtcttcctggcccagatgagggctccctatgccacatgggggccaggtcagggtccaaccccactcaaggtatgtcaagtggaggggatttaatacagggatttatttcaaacttgtagaagatgagaaagggaatattgaagcaatccagctagtaataactgttggaagcagccaccactccctaaggtatggagtacaaagggaaaaggaaggatctagagccacaaagcagtaggtaaatgactagcatgctaaaggtttcacaggaccctgacactcatttcctggatggagaaaccaaggctcaggggtatgggaatggctttgcatggaataacaatgacattcattgagcatttctctaccagtctctgggccaagcactcactgaactcatcccagccacttctggagattggtactgttattatcctgttttaccaatggggaaactgaggcacagaaagtaaggcacctggcccaaggacacacagctaaccagtgtctcctttatgaaacagggcactcttagagaacagacgcagcgtctgctttgtatctgctcccagcttggcagctccatgcttggtacacagcagttcacgtggaatgaccagaggtgaacgtagccattgcttctcacctcccagggagtaatggctcctgcctttgattttctttttttgttgctgttgttgatgttgttgtttgtttttttcttcaagatagttactcactctgtcgcccaagctggagtacagtggcttgatctcagtccattgcagcctcaaactcttgggctcaagtgattctcccacttcagccttccaagtagctgagaccacaagcgcataccaccacgtctggataatctttttaaattttttatagagacagggtctcaccatattgcctagggtagtctcaaactcttgggctcaagcaaccctcccgcctcagccttccaaagtgcttggattacaggtgtgagccatggtatctggcccacgtgactcctgcttttacctgtcaggaacaatgcctgactgactgatgggaaactgaggttccaggaggtgagaggtgaacttacttgtccagagtagcaaatagcaaagcctggatttcagtccagtgcccttgactcttcactcctcctttttgatatatttcctatgtagttatatagtgcttggcatagtgtatggcaaaaaaaaaaaaaaaggctagtaagaaatacataatgacactgattagtatgtattcattcatctctgtggcaaataattattaggtaccagctgggtgtggtggctcacgcctgtaaccccagcacttcgggaggccgaggcgggcggatcacgaggtcaacagttcgagaccagcctgaccaatgtggtcaaacctcatctctactaaaaacacacacaaaaaaattagctgggcatggtggtgcacgcctgtaatcctagctactcaggaggctgtaatcccagctactcaggaggctgaggcaggagaatcacttgaacggggaggcagaggttgcagtgagctgagattgcatcattgcactccagcctgggagacagagcgagactccatctcaaaaaataaaaaaataaaaaaaataattaggtacctactatgtgcccggcacttttctgggtgttgggatatagcagtgggcaaaatggatgaaaagttactgccttcacggtgatcccattctggttgggggaacaagcaaaagaacaaaaagacaaacagatctgaatgtgatggccaatggggtcagttcgttctttttccctccgctcccctccccttcccctctcttttcttttcccctcccttccttccttccttccttgcttccttcgttggagtcttgctctgtcacccaggctggagtgtggtggtgcaatgtctgctcactgcaacctctacctcccaggttcaagcagttctcctgcctcagcctcctgagtagctgggattacaggcatgtgccaccacacccagctaatttttttatttttagtagagatggggtttcaccatgttggccaggctggtctcgaactcctgaccacaggtgattcacccgccttggcctcccaaagtactaggattacaggtgtgagccactgtgcccggccaatgaggtcactacttaatatagaatagcagttctcaaatgtctgggtctccaggaccccccttacactcttaaaccgcattgagatccttagaaagctttgtctgtgtgggttagacctattgacattcactgtattaaaaatgaaaatcgaggccaggcataatggctcatgcctgtatcccagcactttgggaggccgaggcaggaggattgcttgagcctaggagtttgagactagcctgggtaacggagcaacagcctgtctctattttattttatttagttatttgagccaggatctcgctctgttagcaggctggactgcagtggtgcaatcacggctcactgcagcctcaacctctggggctcaagtgatgctcctccctcagtcccgcaagtagctgggactacggacccacaccaccatgcctgattgattttttttttaagaaacagaatctcactatgttggccagtctttatctctatttattgaactaaaaaaaaaaactaaaacggagtctggctctgccacctaggctggagtgcagtggcttgatctcagctcactgcagcctctgcctcctgggttcaagcagttctcctgcctcagtctctggagtagctgggattacaggcctgtgccaccaagcctggctaatttttgtatttttagtagagatggggtttcagcatgttgcccaggctggtctcgaactcgtggcctcaggtgatcggcctgccttggcctcccaaagtgctgggattacaggcatgagccatggcatccagactgtagttctctttcatgtctagaatagaagagagctagcttctcccatccgtgtctgtattcaatccatttcactagcacaggtcatcaggtctctgaaaaacactgctgcatgctggagagagaatgagaatggtgaaggcaaataacatcttagtatttttataaaaatagttgtaaccttgcagatgccttgaaaagatctcagggatcccccaggggttccttggccacagtttgagaactgctgatgtacacaatgtgctgggcactgttaactcctctctcctccccaacagccccatgagggaggtcctgttattatccccacccagcagaaaaccacagcacagaaaggatctgtggctcacagaggtcacatggctaccaagtggctattcaataccacctttagtccctccctgagcctctgtcctccctcttaaataggactctatcatcagtgcaggtctcccagggccaggtggggatgtgcacagaaaggagccacttagcacagtgcccaggatgtggtaagcctgcaagaaaggggcatctgactgtcagggtcccagccagaaacagaagcaggctcacctgcagaaaacttgagtttcttgacaaaggtgtgagtggagaacggggaagctgcaggaagcatatagggctgtgggactcatggaggggagcttttgctcctccctagccagagaaggtagagaaggaaaagttattggaacttggaaggggagagttgccagacaggagctggcactcttagtcaagaacggcagccatggccagacgcagtggctcacgcctgtaatcccagcactttgggaggccaaggcgggtggttcacttgagatcaggaattcaagaccaacctgggcaacatggcaaaaccccgtctctactaaaaatacaaaaattagccgaacgtggtggcacatgcctgtaatcccagctactcgggaggctggggcatgagaatcgcttgaacttgagaggcggaggttgcagtgaggcaagattgcacctcactgcactccagcctgggtgacagagtgagactctgtctcaaaaaaaaaaaaaaagagaaagaaagaaagaacggcagccagaccatggcaccatagcagggaagagctggggagataataccccagactcactttcctctgggcttccctttgtcagccagggctggcttcatgggtgtttgcccgtgcagtgacacagggctccatgcttggtttaatgccctactattgatgtcttgaatttttttgtttttgaggcagtttctacctctgtcacccaggctgaagtgcaatggcgtgatcatggctcactgcagccttgaactcctggactcaagtgaacctgtcacctcagcctcctgagtagctgggactacaagcgtgtgccaccacgcccagataatttttgtagtattttatagagacgggggcctcactgtgttgcccaggctggtctcaaactcctggcctcaagtgatcctcctacgttagtctcccaaagtgctgggattacaggggtgaagcactgcccctggataaaattcttaataaatatttgaacaagggaccttgtgttttcattttgcactgaaaagtataagccatgtttgaggccaacccacatggaagccagaggacaggagggctggtccatgcaggtcagtcctgcacagggcagggtgaagaagcttggactatgggtctcaagatcccgggctgaagcatccatccacctcggcctcccaaagtgctgggatcacaggcgtgagccactgccccagcctattgctaggattcataattatcttgcagtgattactaattcttccccagcagtgttttgcagtggctgaaggcacagacttgggactccagcaggtctggttctgagtcacagctctcccacttgctgccttcgtctctccctctgagccttggatgccttctccttgcaatgggaaggacctcaatgctcaccccctggtggatagcaggagtgtgggaagcagcagagcatctcagtgaagggcatggatgctggcgctgggctgcctgggtcaagccctggctctgtgccttatcacctggatagcccaaggaggttacttttctctccatgcttcagtttctttttctttttttaagagggagtctcactctgttgcccaggctggagtgcagtggcaggacctcggctcactgcaacctccgcctcctggcttcaagtgattctcctgcctcagcgtcctcctgagtagctgggattacaggcacctgccaccacgcctggctaatttttgtatttttagtagagacggggtttcaccatgttggccaggctggtctcaaactcctgacctcaagtgatccacccacctccgcctcccaaagtgctgggattacaggcatgagccaccgcgcctggctgtgcctcattttcttcttcagtaaaatgggcataatgatatttctgacctcataaggacattgtgaaggtgaaaagacataatgcattaagtggtttcagaactgctgacccaacaaatctaagattcagtatttattcacaggtctttaatttttttttttttagaccaagttttgttcttgtcacccaggctggagcgcagtggcacaatctcggctcactgcaaccctctgcctcctgggttcaagtgattctcctgcctcagcctcccgagtagctgggactataggcacccgccaccatacccggctaatttttgtatttttagtagagatggggtttcgccatgttgtccaggctggtcccaaactcctgacctcaagtgatccgcccgcctcggcctcccaaagtgctgggataataggcatgaaccaccgtgcctggccagtctttaattttaactgtcataaaactgagagcatatcaccatcactctactgttttcaaaagctagttgtttcaccttccctttggttgttacttatgtgatacacggttacttcatttgtttttgttcatattccatttggggcatttacccctctccatgctgctttttaattttaatttatttttattttttgatagatggggtctcactatgttacccaggctggtcacaaactcctgggctcaaacagtcctcctgccttagcccctcaaagtgctgggattattcgcgtgagccactgcacctggccccaaaacacattttaaaaaagcaacatggatgattgggcacagtggctcatgcctgtaatcccagcactttgtgaggccaaggcaggaggatcgcttgagcccaggtgttccagaccagcctgggcaacatagcgagattcacatgcctgtgttcccagctactcagaaggctgaagtgggaggatcacttgagcccaggaggttgaagctgcagtgagctgtgatcgtgtcactgcactccaatctggtcgacagagtgagacccccatctcaaaaaaaaaaaaaaaaaaaaaaaaaagaaaagtaatttggaggtggtaaatgaaatatttatatagtgttaaaagttagaaccatctttagctcacttgcttttgccaaattgcctgcccaggtccttctgtggctgctcactctctccccagcagtacacatgagctcctgtttcctctcgtccttgccaacacttggttttgtcagacattttagatctttctcagtccgatggctgggaagtggtatctcactgcagtgtgtgtatttgtatttttttccaatgctactggcgagcttgaccatctttgaccttcttttgtactatttaggttttagaggaaggagttggggcctcctgctttagccagagtacagagttagctcttccctccctgtagggggttcagtctcaaccaagcccagcaaaccatgagatgggggtccccattgttcaagggaggggctgaagcccagaggagacaagggagtggccctggggtcacacagtgatgggtgccagaggcaggctccagcacgagactcctgggcccttttcccagcagagggagcccgaggcaggaagtgactgtgtgggccagggcacccagacggagcccagctgcccctcaggagctgctactggggaagggacctgccaaggccctgctgtcccctggggcatacacaggagaggggttggctgccatccagcctggcacgtttcctggctgtcccatccacccttagggcactggggccaggctgggctgagggaggtactggctcggggtctgaggggtgtagtggtgtgcagtgtgtgagcgatctgtccccctcagcctctctcctgtcctcccgtcgccatctctgtgtctctctcttccctttgtgtccctctctgtcctactctctcactcccttctctctgtctctttatttattttgagacagaatcttactctgtcacccaggctggagtgcagtggcgcgatcttggctcactgcaatctccgcctcccaggttcaagcgattccccagcctccccagtagctgggattacaggcacccgccaccatgcctggctaatttttgtatttttttatttttattttttctttttgagacggaatctcactctgtcacccaggctggagtgcaatggcacagtctcagctcgctgcaacctccgcctcccggattccagcgattctcctgcctcagcctcccaagtagttgtgattacaggcgtgagccaccacgcccggctaatttttgtatttttagtagagatggggtttcaccatgttggccaggttggtcttgaactcctgacctcaggtgatctgcctaccttggcctcccaaagttctgggattacaggcatgagccaccaccccagtctctctgtctctttttatttgacttctctgtctctgcctccttcccgtgttcctcatgtcctccttgtgtcctctccctcatcccgtaccacacccgctgctgcagcaggctctctgggaccccacctcccaggtcctggccacgtgacccagaatcctctctcggggcctgttgccaagctgtgcttcctggccaagaagccagatggtggagtctcaagtcctggctccccagccctcagggacctggccagctggtcggcctcagccacaggctcctgcttggagagatgggggactggtctcctgccagatgagaaaatgcactagaggctttgcagctgccaggctctgtccctggggaccccacactttttccaggcccacccccaccctaagcaaagctctttctctggccaaggaaacaccctcctcccccctgttctgcttctctgtcccatgtttttgtatccagctcagcatggcctaggagaggagtgcacattcagggactatacagtcccagtccttgccttattgggactcaaggcaagggaccccatcctttctttctttccttttttttttgtttttgtttttttgttttttgagacagagtctcactctgttgcccaggctggagtgcagtggcgcgatctcagctaattatgtcttcataattcacaaattatgtcttcaatttatgaaggtgctggctcggggtctgaggggtggagtgatcagtaactcaaattacgtcttcacaaatctccttgtcttcatttctgagcaccgctttcttctgtgttggcctcatggtcagggagtccctgatgttggcaggatgaccccaggatgcccggcctacctcctcccaacttaggaagcccatgggaaagagagcatctcttctgtgcacacacattttcctggcgaaaatggggagagtggccgggcacagtggctcacacctgtaatcccacactttaggaggccaagatgggaggattgcttgaggccaggagttggagacccgcctggccaacacagcgagaccccacctctaccaaaaaagaaaaagtgggaagagttttcattggcccatctaaggttacgtgctcatatctgacccaatctttatgaccagggtgttttcagtgttctgcttggccccacttgggtcatgtgattacccatgactctctaggtttcatttgcccttcaggaagctcaggacctgagagtgagttttgatgtatttggaaggagaggatggattttgggcaggcaaaaccaacaactctgcactacagaactttgaatcaagaagtcttggcttggttcttgagtttggggttttgttttgcagtcatttgtggtaatctgctaccacttaattttttaattgttattttgttttcttctctagctttcctccatctgtttagaattacaagggtaatatatgaatatattcttttgggaaaaaattttactaaccgagcagtcttcagtaaaacataaagtctcactcctatctgcctcccaatcccacatcccaaagagagcctcagttatttggtgtgcatccatctagacctctttctgtgcatttacaagtgtacctatatggatgtttaatgtttttatattatttgcttttcatgtttaatttcaatttttgaataaataaattttcatggtgaagacatcaaaacctctagggaaatcccatgggaaaattatcgccttcatccctgttccccattcattaagttctcatcccctcccccagtaagtaccatctgttatgaacttcttgtttactccagggaatttttatgcatgtgcaatccactataaatttatattcataggtaggttctaaattgcttcttcttcttcctcttttttttttttttttttgtttgtttgttgttgagactgagtttcgctctttttgccaaagccggagcgcaatggcgcgatctcagctcactgcaacctccgcctcccgggttcaagcaattctcctgcctcagcctcccaagtagctgggataacaggcgcctgccacaatgcccggctaattttttgtatttttagtagagactgggtttcaccatgttggccagcatggtgtctatctcttgacctcgtgatccgcccgcctcagccttccaaagtgctgggattacaggcatgagccattgtgcccggcttttttttttttttttttttttttgagatggagttttgcttttgttgcccgggctggagtgcagtggcatgatctcggctcactgcaacctctgcctcccgggttcaagtgattctcctgcctcaggctcccgagtagctgggattacaggtgtctgccatcacgcctggctaattttttgtgtttttagtagagatggggtttcaccatgttggccaggcaggtctcaaactcctgacttcaggtgatccacgcgccttggcctcccagagtgctaggattacaggcgtgagccaccgcacccagcatgctttttcttcttaacagtaacacttggctatttttccatactggtctggatttgtttaaccattttactcttttttattttttatttttttttaagagagggggtctagctgtgttgcccaggctggtctcaaactcctgggctcaagcatttctcccacctcaacctcctaagtagctgggattacaggcatgagctgctgcacctgacttaaccatttctctcttgatgggcattgaggttgcttccagttttttcccattataaactctgctgtgatactacaactttgtgcatctgtgccagtatttcttttttttcttaaaaaaatttttattattattatttaaaaatttttttttcaggatggagtcttgctgtgtcacccaggctgaattgcagcgacgtgatctcggctcactgcaacctccacctcccaagttcaagcaattctcctgcctcagcctcccaagtagctgggattacaggcgtgcatcaccacgcctagctaatttttgtatttttagtagagacagggtttcaccatgttggccaggctggtctcaaactcctgaccttgtgatctgcctgccttggcctcccaaagtgctgggattacaggcgtgagccactgcacttggcctatgacagtatttctttagttatattactagaaatgcaagtgctgggtcaagcagatgcatattttgcattttgatgcaaagacctgccaaattgccttctaaaaaggctctaccaatttatgccaccactgacagtggctgagtgtgcccatctcccaacatctttgccagcattagatactataagtcttttacatttttgccaacctaatgtgtagaaaagaatgccttggccaggcgcagtggctcactcctgtaatcccagcactttgggaggccgaggtgggtggatcacctgtagtcaagagttcaagactagcctggccaacatggtgaaaccccatctctattaaaaattcagaattggccaggcgtggtggctcacgcctgtaatcccagcactttggaaggccaaggcaggcagatcacaaggtcaggagatcgagaccatcctggctaacatggtgaaaccccatctctactaaaaatacaaaaaaaattagtcaggcgtggtggtgggcacctgtagtcccagctacttgggaggctgaggcaggagaatgccgtgaacccaggaggcagagcttggagcttgcagtgagccaagatagcaccattgcactccagcctgggcgaaagagcgagactctgcctcaaaaaaaaaaaaaaaaaaaatcaaaattaaccgggcgtggtgatgtgtgcctgtgatcccagctactcgggaggcggaggcaggagaatcacttgaactgaggaggcagaggttgcagtgagccgagatcatgccattgcactccagcctgggcaaaaagagcgaaactccatctcaaaaaaaaaaaaaaaagaaagaaagaaagaaaagaaaaaagaaaaggaagtcttgttttaatttctattttccagcttattaataagactgagcatcttttcatatgcttgttttgtctgttgcctgttcacatctgatgcccatttctctttttgggcagtcctttttttttgctgatgtcattcatgtatgcattgaacaaatcataactggaggcctattgtgtaccaaaaattgttctaggctttcaagaatatagcagtgagtgtgacacagcccctcccatcatgtgggtcacattctggaagcaagggaccaataaaaatacaaaagtacctgagtgcagtggctcacacctgtaatcccagcactttggaaggccaacgtgagaatagtttgagtccaggagttcaagaccagcctgggcaacatagcaagaccccatctttatgacaaatttcaaaaatgagctgggcatggtggtgtgtgcttgtagtcctagctacttgggaggctgaggcaagaggatcccttgagcccaggagttcaaggctgcagagagttattatcttactactgcatgccaacctggatgacagagcaagaccctatcaaaaaacaaaacacacacacacaaatcaagagagttgtctgatggtggtaagcactgtgaagacgaagcaggatggagggaaattctttgattgttaaactagttccttgcactgatacatatcaatttttacagtttgtcatttgccttctaactctatgaaattttggttgatgcagaagtattttttaattatttttttaattatactttaaattctagggtacatgtgcacaatgtgcaggtttgttacataggaattcatgtgccatgttggtgtgctgcacccattaactcgtcatttacattaggtatttctcttaatgatatccctcccccctccccccaccccatgacaggccccggtgtgtgatgttccctgccctgtgtccaagtgttctcattgttcagctcccacctatgagtgagaacgtgtggtgtttggttttctgtccttgcgatagtttgctcagaatgatggtttccagcttcacccatgtccctacaaaggacatgaactcatccttctttatggctgcatagtattccatggtgtatatgtgccacattttcttaatccagtctatcattgatggacatttgggttggttgcaagtctttgctaatgtgaatagtgccacaataaacatacgtgtgcatgtgtctttatagtagcatgatttataatcctttgggtatatacccagtaatgggatcactgggtcaaatggtatttctagttctagatccttgaggaatcgccacactgtcttccccaatggttgaaccagtttacattcccaccaacagtgtaaaagtgttcctgtttctccacatcctctccagcatctgttgtttcctgactttttaatgatcgctattctaactggtgtgagatgatatctcattgtggttttgatttgcatttatctgatgaccagtgatggtgagcattttttcatatgtctgttggctgatgcagaagtatttttatgtgatcaaattataaatctttccctttatgttttttatgcttggaaagatttttctccatcccaacattataaaagcatttgcccaggttttcttttagtgccttatggatttacttactctgtttaggtctttaatccatctggaattgttttcagtacaaacagcaaggaaaggatccagctaaattggttagccattggcccatgaccattcattaaataatccatctttcccttggggatttgaattggcacctatgaaacacatgaattttcctgtgtatttgggtctgcttttgcactttctgtctattcctaagacacagcagccatccaaattactatagctttgtatttatttttgataatttcttactatcaaatttttttatccggtaatcccagcactttgggaggccaagatgggcagatcacttgaggttatgagtttgagaccagcctgaccaacatggtgaaaccccatctctactaaaaatacaaaaaaaattagcaaggcatggtgtcaggtgcctgtagtcccagctacttgggaggtcaaggcacaagaatcacttgaacctgggaggtggaggttgcagtgagctgaggttgcccactgcactccagcctggatgacacagcacccaggctgatttgttcatcctgaggtcaggagttcaagaccagcctggccaatatggtgaaaccccatctctacaaaaatacaaaaattagccgggcatgatggcaggtgcctgtaatcccagctactcaggaggctgaggcgggagaatcacttgaagccaggaggtgaaggttgcagtgagccaagattacgccattgcactccagcctgggcaacagagcgagactccatctcaaaaaaaaaaaaagcgttaacaaaaaattattactatatttgatggtaataattttggaaagttgactctttggacaaattctttaacttctcttggccttggtttcctcctctgtaaaacagggagactaccaatcttgaaggttgttctgggaattagtgaattaatggaccactttagttccggggtcaggtaagcctctttgagaaggtaatactccagctgaaatctgattgacaaggaagagcatgcctggcagaggaaacagcaaaggcaaaggctccgaggcagggactagcttagtgtgatgcaggttcatgcggagcgcatcgctcctggaggggactgaacaaggagagggtggaagggtgggccgcggtgaggggtctggctgtcaccataagggtactggagagccacagcaggatcaggagggcgggtggggcccattgaccctgcctctgtccccacagtccatggagtcgcaggtggaggagtggtaccgcgaggtgggagagctgcaggcgcagacggcggcgctgccgctggagccggcgagcaaggagctggtgggtgagcggcagaacgcggtgggcgagcgcctggtgcgcctgctcgagccgttgcaggagcgccgccgcttgctgctggcttccaaggagttgcaccaggtggcgcacgacctggacgacgagctggtgaggccagcgcaggggcctggggcggggcggggcggggcggtggggcggagaaggtgggcatggggcggggctgaagatggagacggctgagaccctcccactcatacgctgaaagacgcattcagccgttcactcattcattcattcacactcatttactcactttgaatcattcgttgatttattcatgaagtcactcatttatttattcactcatccatagtttgttctttcctccactcatttatttacttaactattcattcattcactcctctgttcctcattccatcactcaatttcctgatttgctcattcatttgttcactcagttgatcattctagccccagccctgtgtttggatgatagtggggccacaggggtggccaaggcagaccccattgtgccccagagggttcagagtccaacggggaaaacagacttgtccccagacagtgacaattcagggtggttaggaatatgataggaaacaagacctgtatgtgcaaaggccaacggtgtgagcctggcttaagtgcagacagcaagaaagagtatgtcaacagaggagactgagacaggtgtggtggtgcctgttgtcccagctacatgggaggctgaggtaggaggattatttgagcctggggattcgatcccatctcaaagaaaaaaaaaaaacaaaaaatggaggaggctgaatattcaactgggctcttaggcaaggaagggcctgggatgccgtgcaggtttaaagtttagttgcgatgcaggggttcttggatgcattctccccttgacctgcttcctgtgtcctctccaggcatgggttcaggagcggctgccactggccatgcagacagagcgaggcaacggtttgcaggcggtccagcagcacatcaaaaagaaccaggtgagcagagccaggtgagggagcgagttaggacatttggatacatgtgatagaaacagctgaaggtggttaaagccaaaacaatgaatgtattggcttttggaattaacaagactgtggacagcagatacagatgtatccaggtgcttccatatattttcatgactcttggctctattttttttttttttttgagatggagccttgctttgttgcccaggctggagtttagtggcacaatctttgctcactgcaacctccacttcctgagttcaagcgattctcctgcctcagccatccaagtagctgggattacatgtgtgcaccaccacacctggctaatttttgtatttttagtagagatggacggcggggggtggggtgtttcaccaggttggccaggctgggctcgaactcctggcctcaagtgatccactcgcctcagcctcccaaagtgctgagattacaggtgtgagccaccgcgcccggcctgtttgtttttctgcatgagctttcttcttaggccagtcctcctctcctggtgataaaaggcctccagtggattcaggtttacctcccaccagcaaaactgaagagaatttcccacctcaataatgtcagcagtagtctcaggaataactctcattggctcaccatgcccatggcatcccacgcccatccctgaactaatcatgatggatggggtttcggactgctccttgggctggcctggttaagcgccctcccctggaacctgctgctggaatcagccttagcttaattaccaaggctgagatggaggcaaagggggtttcccaaaggaaaatcaggggcttgagactagaaggaaggggaatagctattggacaaggaaaaagtaaaacaacaacaaacaaaatcacaaaacatcgagttagcctggtgtgatggtgtacccctgtagtcccagctactctggaggctggggagggagggtcccttgagtccagaggtcaaagctgcagtgagccttgaacaccccactgcactccaccctgtgcaacagaatgagaccctatctctctctctctctcacacacacacacacacacacgtcccccaaaacaaacaaacaaaaacacccatagggacaaaggacagagataatcagcaagaggatactactgccccctaacctgagcaaggtgggggagggggcctttgagctcctaaaaaatctctgaatctgttcattcctctggggctcagtttccacatctaaagtagagttggtttagagcagtggttctcaaactgcatacgaagggaaccccttggtcaaagcaactatttcaccaaagcctaaagcaagacataaaagaggaataataataataaggcattgtgccaggtgtggtggctcatgcctgtaatcccagcactctgggaggccaaggcaggatgatcacttgagcccaggagtttgagaccagcctgggcaacatggggaaaccccgtctctaccagaaatacaaaaattagctgagcatagtagaaggtgcctgtaatcccagctacctgggaggctgaggcaggagaattgcttgaacccaggaggcagaggttgcagtgagccaagatcacaccactgtactccagcctgggtgacagagtgagaccctgtctcaaaaaaaaaaaaaaaacatcgattaaagatttactaagtgctggctgggtgcagtggctcatgcctgtaatcccagcactttgggaggctgaggtgggtggatcacctgaggtcaggagttcgagaccagcctgaccaacatggtgaaaccctgtctctactaaaaatgcaaaaaattaaggccaggtgcggtggctcacgcctgtaatcccagcactttgggaggccgaggcgagtggatcacgaggtcaggagatcgagaccatcctggctaacacggtgaaaccgcgtctctactaaaaacacaaaaaattagccgggcgaggtgtcgggcgcctgtaatcccagctactcgggaggctggggcaggagaatcgcttgaacctaggaggcggaggttgcagtgagccaagattgcaccattgcaatacagcctgagtgtcaagagcgagactccgtctcaaaaaaaaaaaaaaaaaaagattaaaaaaaaaaaaagatttactgtgtgctaagtactgtcttagggtttatgctgattatttaatttaatcccctctataaccctatgaggtagatattgtcattatcctcatttcaccaaacaatgtatgttggaagaatagggcactgaaggatggtggggaggtgggtctacagattattttggaagcttcctgatcattctgcagtaggtagagttatttaagagactggagttttgctgagattttgttttcctgtcttgatgaaaatactcttggctgtcaacagtgtgggcgacagaactggcttatcgttgtcatggttgaggaaactgatcaagtgcacttagtacttaaaattgggggagctcagctgtgtgtgcagtgagagtgctggatacacaggggctgttaagccaaaaatagctgcaaatatgatgcatttggtgcatgcagactcagttccaagtgctccatagtttatcaccttataacaaccccgcaaggtagattatctcagcctgatactagctgtgtgaccttagcaaattcctcaccctctctgtgcctcagtcttctcatctgtaaaatggagatggtaatgttgtctggctccataggttgggagtgaggaggtgtgaggctatattatgtaaagctcttacttagcaaagcacctggcaggtagcagggtagcagacactcaagaatcgttggctggccgggcacagtggctcatgcttataagcctagcactttgggaggccaaggtaggaggatcgcttgaggccaggacttcaagaccagcctgagtaacatagcaagacctcgtctctccaaaaatattttttaaaatagcagggcatggtggtgcacacctgtagtcccagccgcttgggaggctgaggcaggaggatcacttgagcccaggagtttaaagctgctgcattccatcctgggtgatagagtgacaccctgtctctaaaaaagcaaaataaggagaggacttgctggctgttattatctttatcagttgagtcacacaaaaagttaaataacgttaaggcacacaaaaagttaaaaaagactcacaaaaagttaaataaggtactctgtaagtaaataaggttaaggcacacaaaacgttaaataaggtactctgcaagtacagagctggttgagggaaccttctgggggatggaagtgttccgcacgctgatctgggcacaccggtgtatgtgtctgtacaaatgtgtgcaactgtatacctaagatttgtgcactctaccgtatacaaatgatacctcggctgctaagctgcagggtttctgtattagggcccatcttgggtcggcaagcggcttggctcagagcacagtctctggaaccagcctcctgtgttcaaatcctgtcactccttactggctgcttgttcttgggcgccgtacttcgcccctctgtgcctgttttcccacctgcagcaagcatagggttatgatgagtgagggagtatcagcaaaatgtttacatggtcttggcacgtggttagcgagctgggggtgcttgttaattgccccgtgggccgtgccagtagcagaggagcgtgtggtcttgcagggcctcggaacgccccctctccacccacatccccttacctcctgcccccagggcctgcggcgggagatccaggcgcatgggccgcgcctggaggaggtgctggagcgcgcgggcgcgctggcgtcgctgcgcagcccggaggcagaggcagtgcgccggggcctggagcagctgcagagcgcctgggccggactgcgggaggctgccgagcgacggcagcaggtgctggacgccgccttccaggtggagcagtactacttcgacgtggctgaggtggaggcgtggctgggcgagcaggagctgctcatgatgagtgaggacaagggcaaggtgcgcccgagctgggggtgcggagggcctgggggcgctggagccgggggccgccgctgccgcctcatcgtgggcgctttgtgcccccaggacgaacagagcaccctgcagctgctcaagaaacacctgcagctggagcaaggcgtggagaactacgaggaaagcatcgcgcagctgtcgcgccagtgccgggcgctgctggagatggggcacccggacaggtgggcgggcgcgtggccagttcacaggaatggtccagcaggacctgaagcttcgctgttgggagttggcgcagcgctggaattggacgttgggtgggagaggtcctccttgctgtgtgctggagccctcgaatttggcaagtgggcgggccggaatggggggacacggctcagggatggttgagagggtggggccaggagcacctggatttgagtgtagtagtggggaccttgtcgggggagaaaagagtaggcgatgtctaggactggggtagagaagaatttactcaggacaggcaaggggctctttctactcagtgtctgggaggacagaaaagcctgtgctgagattggctatggcggtggggctggagacctcctggtgcagtggggtgatgttgcctcgtgtaggcggatgctgagctccaggcctggaccagggatggaatctgtaaggaggtacagagagagacctctgtccaagtgggctcagagattggggctagaggtgggatgcattggctggggacccaacctgggagtccagagtcccaccgaggttcctggataggaggggcgtgagactgagatagaaaccgggtgaggctgccgaggtgggcggatcacttgaggtcaggagttggagaccagcttggccaacatggtgaaaccctgtctctactaaaaataaaaaattagctgggcatggtggcacgtgcctgtagtcctagctactggggaggctgaggcaggagaatggcttgaacctgggtggcagaggttgcagtgagccgagatcgcgccactgcactccagcctggtgacagagcaagactccgtctcaaaaaaaaaaaaaaaaaaagaaaagaaaaaaaaagaaaggaaactgggtgaggctggatagaggtgagcttatccatttagggaagcggagctttccctgcatgctgaaatgcagggctttctgaacccaagacttgcagaaaacagagtcctggccaggtgtagtggctcacacctgtaatctcaacactgggaggctgaggcaggaggatcgtttgagcccaggagtttgagaacagagggaacatagtgagacctcatctctacaaagaaatcaaaaagttagccaggtgtagagtcacgtgcctgtggtcccacttgggaggctgcaatgggaggattgcttgagcatgggaggtggaggctgcagtgagttgtgatcacaccactgcactccagcctgagcaacagagcaagaccctgtctccaaaaaaaaagaaaaaagaaaagaaaacagagctctacctggggacacagccgtgtctgaagattccaaggaaacacagccctgtcctggggagggggtttaggggggtcacgctctgccccagaagtctcaggggtccatccctgcccctccatgtcccccttcagcgagcagatcagccggcggcagtctcaggtggaccgcctgtacgtggcgctcaaggagctgggtgaggagcgccgggtggctctggaacagcagtactggctgtaccagctcagccgccaggtgagcgagcttgagcactggattgccgagaaggaggtggtggctggctcacccgagctcggccaggactttgagcatgtctcggtgagcatcattagtaataagtgataccaggagctaccactaaggttctctgggccttagtttcctcatctgtagtatgaggataataacagcacccgcctcatggctctgctgtgagacaaatgagttaatataacgtaaagcactgaggaccctgcttggcacacatgctgcctcacacagtgttggttattattatcagcttattattttattgttacttattgttatttttattgttactgttttgttactattcttgccaggtgttcagtaagtgttagatattattttttatgatgatgatgatgatgatgattatcattactcttacctgccacaaaatggtagcctctgccaggtgtggtggctcatgcctgtaatcccaacactttgggaggccaaggcaggtggatcacttgaggtcaggagtatgagaccagcctggccaacatagtgaaaccccgtctctactaaaaacacaaaaaaatcagctgggtgtggtggcacatgcctgtagtcctagctgtttgggaggctgaggcaggagaattgcttgaactggggaggtgaaggttgctgtaagtggctattgaaccactgcacgccaacctgggcgacagagcaagactctgtatcaaaaagaaaaaaaaacattgtaggctggagggggctggtgtatgctgcccctttgctcactttgctgtacccccccccccacttcctgatggcaggtgctgcaggagaaattctcagagtttgccagcgagacaggtatggcagggcgggaacggctggcagctgtgaaccagatggtggatgagctgatcgagtgtggccatacagcagcggccaccatggccgagtggaaggacggactgaacgaggcctgggctgagctgctggagctcatgggcacacgggcccagctgctggccgcctctcgggagcttcataagttcttcagtgacgcccgagagcttcagggacagattgaggagaagcggaggcggctgccccgcctgaccaccccgcctgagccgagacccagtgccagttccatgcagcggaccctgagagcctttgagcatgacctgcagctcctcgtgtcccaggtggggcgccggtggccatcagggcaggtgggagggcctggacagctgtgggcagcagagtgggcaaaaatcaggctgtggagcaggtcgaaattaggcagtggcacagacagaaagcggactacagaacaggaagaaattagataatggagcagatagaaaatggactgatggaatgatatatagaaatcaggtattggcagggaaaagtggtaccttagaaggtctcacagatattaaacagcttctggctgggcgtggtggctccctttgggaggccaacgcaggcggatcatctgaggtcaggagtttaagaccagcctggtcaacgtggtgaaaccccatctctactaaaaatacgaaaattagccaggtctggtggcgggcacctgtaatcccagctacttgggaggctgaggcaggagaatcacttgaacccgggaggaggaggttgcagtgagcccagatctcgccattgcactccagcctatgtgacaagagtgatactctgtctcaaaaaaaaaaaaaaaaaaaaaagcttccaatagatattgggcagtggttctcctaaaactgtgagttttgcctaaatccagatcaagggtctaaagggaattttgagaagtctgagaggaatttggctgtggtgtagatagaaattagacgacagacaaggccaggtgcggtggctcacgcctgtaatcccaacactttgggaggtcgaggcgggcagatcatgaggtcaggagttcaagaccagtctgaccaacatgatgaaaccccgtctctactaaaaatacaaaaattagcaggaatggtggcgggcacctgtaatcccagctacacaggagactgaggcaggagaatcgcttgaacccgggaggcggaggttgcagtgagccgagatcgcgccactgcactccagcctgggcgacagagtgagactccatctcaaaaaaaaaaaagaacttagataacaggtctctgatggaaatcatatgacttttctgaaattaatttgatgggggcgaatttaatgaaaaaggcaacagagatattagaaattaggcagaggttctggccagaattcggatgtggatctgagcagtcagatggaaatgaagctgcaggcccaatacaactcaggcagcaggaaattgggttgcagttctaatggaaggtagaagttgggcaatttttgtttgtttgtttgtttatttttgagacagggtctcactctgtcacccaggctggagtgcagtggcgcgatctcagctcactgcaccctctgcctcccaggcttaagcgattctcctgcctcagccttccaaatagctgggattacatgcacgcgccaccacacctggctaatttttatatttttagtagagacgggatttcaccatgttggccaggctggcctcgaaatcctgacctcaggtgatctacccgtctcggcctcccaaagtgctgggattacaggcatgagctactatgcccagctggcaattattattattattattattattattattattattatgaggcagagtctctctttgtcacccaggctggagtgtagtggtctaatctcggctcactgcaacctctgcttcccgggttcaagcaattctcccacttcagcctcgagtagctgggactacaggtgcaagccaccacacccagctaatttttgtatttttagtagagatggggtttcaccatgttggccaggctgatcttgaactcctgacctcaagtgatctgcccgccttggcctcccaaagtgctggggttataggcatgagccaccgcgcccagcccagttattttttataaatcctacaaatgacttagaaatcaggctgagagattcatagtaataagtggtggatctgttagagatggggaggtcacaccaaaataaatcaggagattgaaccaacagagtgagcagcaggctgagcacagtggcttatgcctataatctcagcactttgggaggccaacctgggaggattgcttgagcccaggagttcaagatgagcctgggcaacatagtaagactccatctctattacaacatatatgtatatatcctgatacagtggcatgcacctgtagttcagctattagtaggctgaggcaggaggatcacttgagcccgggatgtcaaggctgcagtgaattgtgtttgtgccactgcactgcagcctgggcaacagagcaagaccctgtctcagaaaaacaaacaaaaaacccaaaacccaaaagatagagtgagcagagctcatacagcagaatgaatggaaattgggcaggggagtaatggcaattgaacagccgtcgtgtaggaaactgggctactatgaaggagtgggtttgaaataaactgagttaaaaaaaaattagcacatctaaaagacatcaaagtggaaaggggtttcctgaaagacccaaggtaggggtgggcctgcctgaaaacacaggtggcagacccaatagaaataaagctctcagaccaaaagaaatcaggcagtgggttgaaagagatgtggtagtagatctaaaagaagtcagaatgcgggtaagtcaaagagaaatcaggcagcagatatgacaggagcctggctgtgggatcacagtgtgaggctccttatatcttgaggttctgcgctggagcagatggtgggagggagggcacagcctgggccccgtggagggctggcgcccgacctggcatgcccttcaggtacggcagctgcaggagggggcggcccagctgcggacggtgtatgcgggtgaacatgccgaggccatcgctagccgggagcaggaggtgctgcagggttggaaagagctgctgtcagcctgtgaggatgcccgcctgcatgtcagctccacagccgacgccctgcgcttccacagccaagtccgcgacctgctctcctggatggatggcatcgccagccagattggggcagccgacaagcccaggtgcccctcatccctcctcgggcttcctgcctccccctggtggcctaccccagccacccccagcccattgacagcccccttctcaatggaatgacaacagccaatatctgtgtggcgcctctgtgtgctaggcactgttctaggtgcttcgtgtgtattcagaccccttttttaggcctgtcattggggacttcggtcatggggcatccttctgtccgctgtccttcccagttgcctattattaccctctccatgggatgtcacagcatgaaacaggctaaagacaggatgggcaagggaggtgtgggactgtatttgtgagggtgggtgaagaattctaacaattccagcatctcagtggcttcattagtgggcatgggcttattgctcacatagtggttggatgtgagtgtccagcagaatcctgtcccctggtgattgggagccagggtccttccatcatgccaccctgggagtcacatgctggaccctctgcatcccgctgcagatgggaaaagatagcaggaggatcacacagaaggttttagggataaagccggcacccacacactgccagcccggtggcctaacctgtctgccagggaggctgcaaatttttttttctcttgagatggagtcttgctctgttgcccaggctggagtgcagtggcacaatatcacctcactgcaacctccgtctcccaggttcaagcgattctcctgcctcagcctcccaagtagctgggactacaggcgcccaccaccacgtctggctaattttgtatttttagtagagaaagggtttcaccgtgttggccactctggtctcaaactcctggcctcaagtggtccacctgcctcagccttccaaagtgctgggattacaggcataagccaccgtgcctgacctaggctggaaatttagtttcatggtgtggctaggaagaaaaggacctagggaatcagggacacctggcattgcttctgggaatgcagatcctgcagcctgcattcatttactcagcaaatatgtattaaatgcatatggtgtgccatgtggtgagcaaggccaagcacttgccctgagacagattgcattctcatagcacttattactttctgaaatatagcatggggatggggcacagtggctcacgcctgtaatcccagcactttgggaggctgaggcaggcagatcacctgagctcaggagtttgagaccagcctagccaacatggcaaaactccgtctctactaaaaatacaaaaattagccaggcatagtggtggacacctgtaatcccagctacttgggaggctgaggcaggagaatcgcttgaacccgggaggtggaggtcacagtgagccaagatcgtgccactgcactccagcctgggtgacaagagcaaaactccgtctcaaaaaaaaaaaaaagaaaagaaaaaaaaatgaaatatagcgtgggtatatatacatacataggaagggaatgatagctggcaaagtctctctgaggatgtgcgtttgactggagacctgaatgaagtgatgggtgagtcaggtaaagttttgagggaagagttttctaggtggagggacccacaagtgcaagggcccagaagtgggctgtagttaggcatgtgtgaggaaaagctagagatcactgtggccagatggagggagggagtgagggagtgtagggtgagaggaagtgagtacagaggggcactggggccctggaaaccacacatggtgaggagcatgccttctctatgaggaacgtgggagccatgcgagagtttagagcagagtggagtgatgtgatgtgtacatttgagaaaaataggccgggcatggtggcttatacctgtcatcccagcactttgggaggccaaggcgggtggatcacttgaggacaggactttgagaccagcttggccaatgtggcgaaaccccgcctctactaaaaatacaaaaattagctgggtgttgtggcatgtgcctgtagtcccagctactggggaggctgaggcaggagaattgcttgaacctggaaggtggaggttgcagtgtgctgagatcgtaccactgcactccagcctgggcaacagagcgagactctgtgtcaaaaaaaaaaaaaaaaaaaaaaaggctgggcacagtggctcacacctgtaatcccagcattttgggaggctgaggtgggtggatcacttgaggtcgggagttcgagagcagcctgaccaacatagagaaacctcatctctactaaaaatacaaacttagccgggtgtggtggcacatgcctgtaatcccagctacttgggaggctgaggcaggagaattgcttgaacccaggaggcggaggttgcggtgagccaagattgtgccattgcactccagcctgggcaacaagagcgaaattccatctcaaaaaaaaaaaaattaaatatacagggaagtaaaggtaacccacatgtgtatcgtgaacacttggcttgaacaaccatcaacatttggccaatctagccaaaagaggtggctcacgcctgtaatcccaacactgggaggccaaggcaagaggatcacttgaggccaggagtttgagactaccctacgcaacatagtgagaccccatctctacaaaaaagaaaaaaattagtcaagcatggtggtgtgcatgcctgttgtcccagctacttgggagtctgagggaggaggatcacttgagtccaggagggtcaggctgcagtgagccatgattatgccatttcactccagcctgggtgacagagcgagattctgtcttaaaaaaaaattttttttttttaattagctgggcattgtggtgcatgcctgtagtcccagctaccctggaggctaagccaggatgatcacttaagcccaggtggtagattcaaaccatagcatgaagctatgattgccaactgatggaaccttcagaaacttggaatttgttttggacataagatggcttagaatggtgctgtccaatagttatataacacgagccacaaatgcgagccacatatatactttaaaatcttcttgtggccatactaacaaagcaaagcaaatgaaacttaattttagtaatacatttttatttaacctgacatacccaaagtattatcacttcaacaggtagtcaatattaaaactattaatgaggccaggcagtttcgaacttctggcctcaggtgatccgcccgcctcagcctcccaatctcagccaagcggagatcgcaccactgcagtccagcctaggtgacagaaggagactccatctcaaaaacaacaacaaccaaaacaaagaaacaaaactattaatgaggccaggcgcagtggctcatgcctgtaatctcggctgagattgggaggctaaggcaggcggatcacctgaggccagaagttcgagaccagcctggccaacatgccaaaaatccatctctactgaaaatacagaacaaaaaattagccaggcttggtggcgggcacctgtaatcccagctactcgggaggctgaggcaggagaattgcttgaacccagaaggtggaggctgcagtgagccaagatcacgccattgcactccagcctgggcaagaagagcaaatctctgtctcaaaaacaaacaaacaaacaaacaaaggctgggtgcggtggctcacgcctgtaatccctgcactttgggaggcctaggcaggcggatcaactgaggtcaggagtttgagaccagcctgacaaacatgttgaaaccctgtttctactaaaaatacaaaaaaattagccaggcatggtggcaggtgcctgtaatcccagctactcaggaagctgaggcaggggaatcgcttgaacctacctagaagggggaggttgcagtgagcggagatcgcaccactgcacaacaacaacaaaaaactattaatgagacattttacattcttttttacattaactccacaaaatctggtgtgcattttacactttacaccaaaattcagactggccacatttcaagtgctcacatgtctagtggctactgccttggagagcacagacttggaacgttaaaatcattggctagtggaaccttcagaagcatagctagaaaaagtttgaaaatttggatcttggctgggtgtggtggcttatgcccatagccttgaactttgggaggctgaggcaggtggattgcttgagcccaggggtttgagaccagcctgggcaacatagcaagaccctgtctctacagaaaatgaaaaattagttgggtgtgatggtgtgcacctgtggtccccgctactcaggaggctgaggcaggaggattgcatgagcccaggaggttgagactgaagtgagctgcaatcttgccactgcactccagtctgggcaacagagcaagaccctattaaaaaaaaaaaaaaggaaaatttggatcttgaaatcctagaaggttagaatcaccaaagtgtgaaattttagaaacttggaaaatttgaatcattgaattagtgaaccatggaccctcagaatttggtcatcgaaagtaggtgtctcagtctggtttggtgactcaacgcctgtaatcccagcactttgggagactgagatgggaggatcacctgaggtcaggagttcaagaccagcctggccaacatggagaaaccccatctctactaaaaatataaaaattatctgggcgtggtggcaggtgcctgtaatcccagctactcaggaggctgaggcaggagaatcgcctgaactcgggaggtggagtttgcagtgagccgagatcgccccactgcactccagcctgggccatagggtgagactttatctcaaaaaaaaaaagaaaagaaaagaaaagaaaagaaagtaagtgtcttgaggtggtatgggatgtcagcctcaaggatttggggtcaccaggagccacatgtatggggcaggctgaggaggctccctgtggctcagatccctgcctgccacccactgcagggacgtgtcatcagtggaggtgctcatgaactaccaccagggcctgaagactgagctggaggcgcgggtgcctgagctgaccacctgccaggagctggggcgatctctgctgctcaacaaaagtgccatggctgatgaggtggggagcagggagggggtccccctctgccacccgggcacattggggtggaagccattccacaccctgacttccctcccacccacctgccactcccagatccaggcacagctggacaagctgggaaccaggaaggaggaggtgtcggaaaagtgggaccgccattgggagtggctgcagcagagtgagtgggggcccaggcacacgtggttcaagggcacagggacatgctccagcctgtccagccaaggcccagagggtgacaggagcatgctttgcaccctacccatgggtctccagaagcaaacataagggcctggaagggtggacaagggggctgccttgccattgaatacccacccttgaaaaaaaagtcttaaagtcctgggtggggggacattaaggaaggaggaatgggagtcagaaaggaggaatgatgcccactgaaatagccccagcctctgccattcctgcagagcccaggatggtcagggctcgggtatggaaagccggaggggtgtggaaggccaggggaacagccattgcccccaggaagggccccagatgccccagaatccttaccctgcatgcccctcctcagtgctggaggtgcaccagtttgcccaggaggcggtggtggctgatgcctggctgacagcccaggagccgctcctgcagagccgggagctgggcagcagcgtggatgaggtggagcagcttatccggcgacatgaggccttccgcaaagcggctgcagcctgggaagagaggttcagctctctgcggcgcctgaccacggtcagctccccagatactgccccattacccccacccccaccaagacccccacacccatggctctatatgagacagacacaccgagacatggtgcttggtcctgtgttgtgtgagtgccaagacagactcttgctaggctcccagtggagcagagggacagacctgtcaccagtgacagcccagaatgtcagggatgtgataggggaagaacaagcagagggatagtgcctgggatgggggagtgggagggggaactggcctgggggattctattctgagacttgaataattaggtgaagagaatgtagtaataaaaaggattaggccaggtgtgacggctcatgcctgtagtcccagcattttgggagaccaagatgggtggatcacttgaggccaggagtttgagaccagcctggccaacgtggtgaaaccccatctctactaaaaatgcaaaaattagctgggcgtggtggtgcacgcctgtaatcccagctactcgggaggctgaggcaggataatcacttgaacttgggaggcagaggttgcagtgagccaagatcgtgccactgcctgggtaacagaacaagactccatctcaaaacaacaacaacaataaaaaaaaaacaacaaaaaaaaaccgcttaaaggctgggtggggtggctcacacctgtactctctttggaagcctaggcgggaggatcacttgaacccaggagttcaagaccagccttggcaacatactgagaagccgtctctaccaaaaccaaaagcaaacaaagaaaaaacagccaggcgtgatggcacgtgcctgtagtcccagctactcagaggggtgactgagactcgaggatcacttgagcactggaggtcaaggctgcaatgagctatgatcttgctgcttgcactccagcctgggcgacagagcaagactgtctcaaaaataaataaataaataaataaataaataaataaataaataaataaagtcttaaagtcctgggtggggggacattaaggaaggagaaatgggagtcagaaaggcacgcagagcaattgatttacccaatttttaaaaaagtgatttagccaattcttaaaagagcaataggtgtttgccggagagaataggctttaagttcttggcagagagcaaagcatcgcacaggcctggacaccttgctttttcaaggaactggtcaattgagtgatgaggcagaaaaacccaggccgcctccccggacctcccccttaccccgccccggccccacgcctccaacctaaccctggtccctccatcctcagatcgagaaaatcaaagcggaacagagcaagcagccgcctaccccactgctggggcgcaagttctttggggaccccacggaactggcggccaaggcggcgcccctgctgcggccagggggctatgaaaggggcttggagcccctggcccgccgagcctcggacacgctctcggccgaggtgcggactcgggtggggtatgtgcgccaggagctcaagcccgagcgcctccagccgcgcattgaccggctgccggagatcccggggagggtggagcccgcggccctgccggccgcaccagaggacgcggcggagacccccgcgacccccgcggcggcggagcaggtgcggccacgaccggagcgccaggagtcagctgatcgcgcggaggagctgcccaggaggcggcggcctgagcggcaagagtcagtcgatcaatccgaggaggctgcgcggaggcggcggccggagcggcaggagtcagcggagcacgaggcggcacacagccttaccctgggccgctatgagcagatggagcggcggcgcgagcggcgtgagcggcgcttggagcggcaggagtccagcgaacaggagatgcccatcagaggagacctggtcaaggggtgaggtgcccgccttatgaccagaaagtgaggggaggggaaagcggagagctcctagaacccctcaggcccagtgaaagggcttcagggctcagaacttcccaaagaaggagatatcgccgcggtacccattttgcagaggtgtaaactgaagctgcaagataatcgatgtgcccattgttacacagaaaggggagcccttcctgttgaaagaaaaggcagactgcctttctccagacgtaggttctcggcccctgggttgtgactcctgcatcaagtctcccgggtgccccgaggcagggattttgtcctctctgtgcctcagtttgcccactgggctaatggtggaaccctcacctccttgattggagaggagaccctttatcacaattctctcagcagccttatgaagtgggggctgttgtcttctccattgtatgactagggcaactgaggcacaaaaagggcaagtcactcagcttaaacgaaccaggactttcagaatccagagttggccagtgtgtgttgtgcagatctgtccagtcagctgagtgtgtctccagaaagaggcctttggtcaggagacaatgacttcttgattctttttaaattgcacatttcatgaacatttgctgagtgcccactctgcctggcatgtgctgagtcgagcggtgactgaaccagtcccatccctgactttagagactcacagtccattgggaaaaacaggcttgtcatcaatgatgaccgagaattatctgggctggaatgggggcgattgggggactggagagtcaggggtgggtggagaaaggcaacgtttgcaagttgttctttgtgctgcttaaaattcaaaggggcatctgggcgcggtggctcacgcctgtaatctcagcactttgggaggttgaggcgggcagatcacttgaggtcagaagttcgagaccaacctggccaatatagcaaaaccctgtctctactaaaaatgcaaaaattagccggcatggtggcgcacgcctgtagtaccagctacttgggaggctgaggcaggggaatcgcttcaacacaggaggcagaggttgcagtgagccgagatcatgcaccactacactccagcctgggcaacagagaaagactccgtctcaaaaaaaaaaaaaaaaaaattcaaaggggcgagaggtttggtcttccattcagcagacacgtcccaaacacctgtggtacctaaggcgagcatctgagagaaacagctgcagaagtgggcaggggcctggcacttccagctaagaagtggaggctcctctgcccagccagacaggtccatgggagaaggaaccctggtttcactgggtctttctgtcccccatcccccaggaaggccaccctggctgacattgtggaacagctgcaggagaaagaggcaggcccagggctgcctgctggggtaagttgagcctcggatgggtggggataggaggacccctttttcagagcaggaggcaggatctcagaaacagccagtgcctagccctggcaggacccattccctacctggaccctgcagagacagcatggactctcagggtccccagaatctgaaaatgtcccccttagaaagacggggcacctacctaagagacccctactgcccctccacacacacacacacacacacacacacacacacacacagacacacacacacagacacacacacacagacacacagacacagatacacacacagacacacacacacagactcttcccacatctgtcctggactccgtatttcttcagctcagtggggtcccaaatttcttcatagcctcatacacacacacacagaaggaagccccaggtttctcctgcagacagtggggacacgccctgcttgcacccccacctccagagatctggctgcctctttccaccaccgagagagattccaaaccaatgagtcctaacagactcactcccaagacccatggggccctaagaattgggcctccaaccctgaggtcctcccatactcgcctccgagacaaatggccctgtagacagatgggaccccagacccatgactcccccaaacagatgacccccacaccctctccatggacagcacccctcttccccctcccttcacacagccgtcgctgcctcagccacgcgagcttcccccaggtcgcctgcccaacgggcttgagctgcccgagcggacacctcggccggaccggccccgggcgcgggaccggcccaagccgcgacggcggccgcggcccagagagggtggtgagggcgggggaagccggcgctcgcgctccgccccggcccagggcggctccgcccccgcgcctccgccaccgcccactcacacagtgcagcacgagggcttcctactgcgcaagcgcgagctcgacgctaaccgcaagtcgtccaaccggtgagcgtgtgggcggggctttggaaggcgggtctcaggctcagggtgaccattgcgtggagcggtgggactgaggagggggtgtggctcaacttcaggccctccagcaggtggcggtagtaggtggggccagagctggggggtggtggtggcttaaatcaagaaagccaaccaatgagcaggagggggtgtggtttaacgtcaggccctccaacccgtgggggtagtaggtggggccagatgaggggtggggctcaactttgatgattccaaccaatgaacaggaaggggcaggacctaaggttagtgcatctaatggatgatgggtagagcttaggtgggaacagaaggaaaatgttctgaaagtgagtaaattggaacctaacctcttagcaaccaacccaggagttgatcagctaaatagcaaagagggaggcatctagttgagaaggtttcaatggcttgtcgtggagcttggagaggtcactcaaccaatgagtggggtgggtctacccttgaagtttcaaattgggggagggtccgaaaacgggcagagcccaaactaatgagggtaggggttgggaagggggagtcatctcttacaggtttccaaatgagggtctagccatgatgtgcctgctcttggggagtccagctcctgcttgtccaccctctttttgtccaactgagaggcagaatctggggacaagtggagccaaaaaggggtatcaccggccagtaatggagtgagtcccaagatatgaagtgggcaggacagattcagattttgctagtggaatctgtaggtggtctttcttcctcgtacctaatgccaaggtaggaataaacaagggcacctagtatgttttgctttgggagggattcctccaggatcgaggctttggatgactggagagacaggaattctttattccagacagtagaccaatagactttccttgagaaagctccatgagtggggaggattgagtggagcaaaggcttatggaggagacagcttaagacttaccttcaggaaattcagtatgggaggggataaggaagggaaatctcagcctgggcaaaggcttgatactgagagacttaaatgctcccctcagggcagcaacagccttaaggaagagcattttaggtccaactagggcgcaactagggcgcaaaggtccagaggtaggaaggctcagacatattcagaccttgaggatgttaatgaagagttattaggcagagtgctgcggctctgccttgagccccatcttgtcgctccaggtcgtgggtgagcctgtactgtgtgcttagtaagggggaactgggcttctacaaggactccaagggcccggcatccgggagcacacacggtggggaaccgctgctcagcctgcacaaggccaccagcgaggtggctagtgactacaagaaaaagaagcatgtcttcaagctccagtgagccccccaatgggcaggagggagggatccaaggctcagcttcaactcccagtgggaccctggcttccctgggggacacttggtgggcaggtgggctgggccccttccccagatctctgaagtcctgtgtcccttcctgcaggacccaggatggcagtgagtttttgctccaggcaaaagatgaggtgagatctggtcctttcctccctctgtgtggacctcagtaatgacctggctgtctggctcctgacccagagtgatggggctgtgagaagggacactcacaggccagagttatcagggctgtaatgggaaagcccacaggcactgagagcccaaaggaggttcctaacccagtggggagtgggaagggcttcagggagggctgcctgcagatcctgatgacaaagtccaacatctttgccgtggtcactcaggtgagactggaatggagggagttcgctttaaaaaggggtgatttggccaggcgcggtggctcacgcttgtaatcccagtactttgggaggccaagacgggcagatcacctgaggtcaggagtttgagaccagcctggccaacatggtgaaaccccgtctctactaaaaaatacaaaaattaactgggcatggtggcaggtgccttaatcccagctacttgggaggcagaggcaggagaatcgtttgaacctggaaggcggaggttgcagtgagctgagatggagccattgcactcaagcctgggggacaacagcgagacttccttcgaaaataaaataaaaataaaaagggtgattcagagggacagtgggggtctaaaaaaaggagtgattcaggttgggcaccatggctcaggcctgtaatcccagcactttgggaggccaaggcaggagactgcttgagcccaggacttcaagatcagcctgggcaacacggaaagatcccatctctatgggtaataataataataaattagccgggagtggtggcacatgcctgtggtcccagctactcaggaggccgagtggaaggatcacctgaaccagggaggtcaaggctacaatgagctgtgattgtactatggcactccaggctgggtgacagagtgagattctgtctcaaaaacaagagggggtgggtgatctaggtagagggaactgcaagtgcagaggaccagaggtgcagtattgcaaagggttaactgctggagggcagagttcatggaagaaggtcccagaaaggttcccaggagataggtgtctcaggacaggatgggccatttggaggagattggattttttacctaagggcactggagagctaggggggattacagtgatgtgtaaaaaagattcctggctgggcgcagtggcttacgcctgtaatcccagcacttcgggaggccgaggcgggtggatcacctgaggtcaggagtttgaggccagcctgaccaacatggagaaaccccatctcttatggtgcatgcctgtaatcccagctactcgggaggctgaggcaggaggattgcttgaacccggaaggcagaggttgcagtgagctgagacagcgccattgcactccagcctgggtaacaagagcaaaactccatctcaaaaacaaaataaacaggccgggcatggtggctcacgcctgtaatcccagcattttgggaggccgaggcgggcagatcacaaggtcaggagatcgagaccatcctggctgacacggtgaaaccccgtctctactaaaaatacaaaaaaattagctgggcatggtggcgggcgcctgtagtcccagctacttgggaggctgaggcagaagaatggcttgaacccgggaggtggagcttgcagtgagctgagattgcgccactgcactccagcctgagcgacagagcgagactccatctcaaaacaaaacaaacaaacaaaacaaaacaaaacaaaacaaaacaaaaaaagattcctttggctacctgggtgggtagcccaggccgcggccagggcagggacccaagtgggagagcgcatggctgggccacacaggcctgtggggagaggaggaagaggagtctgagagaggcaagcataaaggtggtttgaagagatgttgagagtaataactaacacttgttatctcattcaatcttcacaagatgcaatgaagaagtgggctttttttttttttgagacagagtttctctcttgtcacccaggctggagtgccatggcgcaatctcagctcactgcaacctccacttcccgggttcaagcgactctcctgcctcagctacctgggtgactgggattacaggcttgcgccaccatgcccggctaatttatgtatttttagtagagacggggtttctccatgttggtcaggctggtctcaaactcctgacctcaggtgatccacccgcctcagcctcccaaagtgctgggattacaggcatgagccaccacacccggccagaagtaggcctttacccactacatgccttcttttacttatctgcacaatgaagattaaaaatagtttcttggcctggcatggtgcctcacacctgtaattccagcactttgggaggctgaggtgggcagatcatttgaggtcagaagttcaagaccagtgtggccaacgtggcgaaaccccatctctactaaaaatacaaaaagtagccaggcatggtggcacgtgcctgtagtcccagacactcaggagactgaggcacaagaatctcttgaacctgggagatggaggttgcagtgagctgacatcgagccattgcactccagcctgggggacagagcaagactctgtctcaaaaaaaaaaaaaaaaaagtctcttatcatagggttactgtgagaattaaattgctccatgtttaattgatacatgataaactgatacttagcacagggcctagtaaatatcagtgctctagtagtgcctgcccatattattatcattgtttgtgtcatttatctctgtagtaggaagtatatacaatcctattgcataggtttaagggaattaatccactaaagtgtttggaacagagcctggcacatattgctatgtaactgcatcatcatcatcatccctttttaatagatgagaaaactgaatttcagagagggtagtctgatctgaaattcacctattattccagcttctctcttccaaatacggcctctgtgccctgtttcttcccccaggaggagatgaacggctggctggaggctgtagcttcctcggtggcggaacacgcagagatcgcccgctggggccagacactacccactacttcatccacagatgagggcaaccctaagagggaaggcggagatcgcagggccagcgggcgcaggaagtgacttcccacccccaggacctgacacatctcgtctcccctcttttccgcactgtgggcacaaagacactttttcttccgcaggggcgggagcccctagttccaacactgaggacgcgtgacatggtgggcaccggaaaggaggggacttctcctgcaccccaagaagtggtggggagattgctgcccctatagccatatctcggccccttcccactcaccacccccaccccaggtgctgggggtcccttatttttatgcaataactgagcttgatgggggtgggcagggggccagttgagccaagcccccagccccgatctgcagatcctgccccaagaagctggggtggtgggggcagtaattcctgcccccctctctgccctagggatgggcacgggggcgctggtgaggtcccctggaccatccagggtgctagggggcagggaggggacaccccctccccgcctttacctcacttccaatgctgccttgatctctgtctgggaggggggagtgaaggggccctagccccctgcactccgccgcctcagagccatgcggttaattcctgacttagtttatttttgcaaaacgtcgatctcctcctcccccgccccgcatccgcgaaggcttttaatgggaggggcgtcaaagctcaaaactgttttcctctctcctcccccctccagttgtaaatgccacttcatgaggggaggggcgaggggaagcccacccctgcatgcttctggctggagcacctccctggggagtcgggggattgggttgtgggcagtccccatggccgcctggagaagccgctggggcccgggggtgtggggcggtgtggcgggcgcacactgtatgtacctataataaaccctttggctttgacggtctatggtcctttgtttgggttttctgggctgcgcccgggaggattgaaaggagggctgtggtggctgtaggggtgggtgcggggtggggagaggggcacgggggtaccgtggctgcggagaacatccagatgtacccttttatgtggacttaatttcggggtctaaacacacgccccttgacgagaacctagagggatggagaatatttcgttatgcttcgtaataaacttccccaaaggagactccgggtccgccccgtcaagttcaggaaaggcggacccctttaaggaggcggaaaagttaaccgcgatgggcaggcgctctgtccaatcgctagtgactcctggagtctctggcccaatgagcagcctatggaggcggggtccgggtgcacacccggaagtgggtgcgggccagccggctcgcccgggggccatggcagcagcggctactgcagccgagggggtccccagtcgggggcctcccggggaagtcattcatctgaatgtgggaggcaagaggtgagtgtgggagactcctgaggtcccatcctcgggggcgggaagcggggtgggagtatccgcctctcctgggggaatccctgtccatcaagggttgctccgccccccccccctttggaggcgcgagattctggaaaaacgccgggggagggggaaggggagggaaccctggatcctgcgggagggggacgcattcctcacccgctcctcttcatctcttgcgtccgtttaccttccccgcccagattcagtacctctcgccagactctcacctggatcccagactccttcttctccaggtgatcgggagagcgagtttggggcgagggtaggagggatggagagggcgtgggagacctaatatccactcccccggcccgtgacgcctgctcggtgtcccttccctgcagtcttctgagcggacgcatctcgacgctgaaagatgagaccggagcagtgagtcggacaagaactgaaatgggatgggggggaggggttggtaggaagaggggcaggaccccactcagtcctgccttttaccccatccatcctctgcccccctttcccgcagatcttcatcgacagggaccctacagtcttcgcccccatcctcaacttcctgcgcaccaaagagttggatcccaggttggcatggaaaaaggggagggagtccctcactgtcttcagtccctgaggagttctttcacctcctctgaatgtccacgtgagctccattctattagaattctcattcagaaccttgatcacaggccgggcgcgccgggattgctcacgcctgtaatcccaacactttgggaggccgaggtgggaggatcacttgagcccaggatttggagactagcctgggcaacatagcgagaccccttctctaaaaaagcaaacaggcaaaacttcatgagaatcttgatcatgttaaaattttatgtccttcgatttctccctacacacacacacacacacacacacacacacacacacacacacactcaacatttcctccacccatatcatcactccttagcatctttattccatcaaaactttctaccccttgacattctctgtgcagttttgaaaattaccctctcagcattctctgttcacccccacacctagaccctgacctctagtcaattctactacccaggggtgtccacggttccagcctcctccatgaagcccagttctatgggctcactcctctgggtaagtgggagcccccagctatcatcctcattgtatagaaaaccaactctgtgatgctacctgcccctcttccccttctctcctgaaagagggctggggtagaggtgggaggactggttatggccctggccgggtctgtattcgtactgggaggagtattggtactctgtgtagaaagaaatggggagggggaaatggggtggcctcagcatctccctaagtcccagcctttaagtcctcctgttgcagttcgtcgcctgcagcttcgagaggagttggatcgatcttcttgtggaaacgtcctcttcaatggttacctgccgccaccaggtaggcactcccaatggaatggaggggcgcggaggtgggccaaagactacatttcccataaggctgcagctctcgggtgcctgtgctgtgcgtcctgagatacagtgggaggtgtagttccctatcagatgcttgggctgatgcttggaaaggaagttggacacagcatttcccatgagacaatgggccagctaactcttgaggctcagaaggatgtcctggagccccatgggagttgtagtccgggtttggtttctttgtagggggggctttggaagacctgggattcttcgtatggaggggagaaatattaataggaagttattgacagtaatgcccatgatagccagcccactggccatggaaggtatgccccagtggttattggaactaggcttttctgattggtagaagtaacagagtagggaaatttcatctacagctttatttccctaactgcagtcagcacctgctaccttcatgaaagttgccagatataaagatctgtagtagtacttttccaacttagttttatcctgttttccgaaaaacaatcatttatttatttatttatttatttaattttatgagacagggtctggctttgtcacccaggctggagtgcagtggtgcgatcttggctcactgcaacctctgcctctcagattcaagccatccttccacctcagctctgccactgagtagctgagactacaagcactcgccaccatgcccggctaattaaaaaaataataatcattttaaatgcaagctttatattataaatacaaagtaaacatgaaaataaaacccaaacatagcagtgttattaaactctggcctgtagcagtggctcacacctgtaatcctagcagtttggaggccgagacaggtggattacttgagacctggagtttgagaccagcccaggtgacacagcaagacctcatctctactaaaaataaaaaaaaattagccaggtgtggtggtatgcacctgtggtcccagctacttaggatgctggagtgcgaggatcgcttgagcccaggaggtcaaggctgcagtgaactatgatcactcattacaccccagcctgggtgacagagcgagatgctgtctcaaaacaaaacaaaacgaaaaacaactctggctagatgctattgcttgccaagggtgcagtcttccatttattaaaagtgaaaattagggccaggcacattggctcatgcctgtaatcccagcactttgggaggctgaggtgggtggatcacctgaggtcaggagttcgagaccagcctggccaacatggtgaaaccttatctctgccaaaaatataaaagattagccatgtgtcgtggtgggtgcttgtaatctcagctacttgggaggctgaggcaggagaatcacttgaacccaggaggcagaggttgcagtgagccaagattgtgccattgcactccagcctgtgcaacgagcgaaactccaactcaaaaaaaaaaaaaaaaaaaaaaacggaaaattaggtaatactgcagattcattaatatcacagcagcactaaactcagtcttcctctgtgctgggctcaagggaactgaaagggaagtaacttgctatgtggttcagtgtcatttcatgctgtgtcactgcaccacttaaaatcttcacccggagactatgtcccacacatggggaaatcaatcaccgtcatattttaagtgcttgctgtgtgacagccacgattacaatgactgttactctacctcttattctcactgtagtgttcccagtgaagcggcggaaccggcacagcctagtggggcctcagcagctaggaggacggccagcccctgtccgacggagcaacacgatgccccccaaccttggcaatgcagggctgctgggccgaatgctggatgagaaaacccctccctcaccctcaggtacgtttctatctcgtggaaggttggggcagctgtggggtccctgtgaccctcttctgatccctactcttcccctcaaggacaacctgaggagccggggatggtgcgcctggtgtgtggacaccataattggatcgctgtggcctatacccagtttctagtctgctacaggtgcttggggagggagtggcaggaggtcccagccctgttgatgggaagggcatgcggtgagggttggtgatgtcccctcgatcctacaggttgaaggaagcctctggctggcagctggtgttttccagcccccgcctggactggcccatcgaacgactggcgctcacagcccgggtgcatggtggggctttgggtgaacatgacaagatggtggcagcagccaccggcagcgagatcctgctatgggctctgcaggcggaaggcggtggctccgagataggtatgaccccaagccttttccagaaccctctgtcctttaaattctactgcctgttaaaatgacccaccccataaaatcctcaaacccataagaattctctgctctattagatctgtttgtgtcattagaatgctccagcccttcagaattctgtatcctgttagaattccctggcttcctagaaaaatccacccacatacaattctccctccatcagaattccctgccctgttagatctcttggttttgttagaatgcgctattctgtgtggccatgagaaatgtctgacttggcccggtgcggtggctcatgcttgtaatcccagcactttgggaggctgaggcgggcagatcacttgaggtcaggagttcgagacccccttggccaacagggtgaaacccagtctttatttcaaaaatacaaaaaaattagctgggtgtggtggcacgtgcctgtaatcccagctactcaggaggttaaggcaggagaatcactggaacctgggaggcagatgttgcagtgagctgagatcgcaccactgcattccagcctgagcgacagagtggacagagtgagacaccatctcaaaaaaaaaaaaaaaacaaaaaaagaaatctctgacttatggctgggcacagtaactcacatctgtagttccagcactttgggaggccatggcaggaggattgcttgaggccaggagttcgaggctgccgtgagctatgtaagccatgattgcaccactgcactccagcctggacaacagagcaagaccctgtctcaaagccacagcaacaaatctcggacttattaatctgtccccaaataaatctcagccctcgtaagaatcccctgccaccagtggaggtttttttgccttattgcaaatctcagtgctgttagaattccagaccgttttagaatcccataccccatcagaaatcttctggcccattttatcttctctaattcctgctggaatcttcactttttttttttttgaaatggagtcattctctgttgcccagattggagtacagtggtatgatctcggctcactgcaacctctgcctcctggggtcacgcaattctccttcctcaacctcccaagtagctggggctacagttgtgtgctaccacactcagctaatttttatattttttagtagagatggagtttcatcatgttggccaggctggtctcaaactcctggcctcaaatgatccgcccacctgagcctctcaaagtgttgggattacaggtgtgagccactgtgcccagcccctgatggaatcttctatccttcaaggattctgtggtcccactgaaccctctggtccttggagttcttcctcccacctctcctcctccatgaggcagggttccagctgagccctttttgcccactgcaggggtctttcatctgggggtgcctgtggaggccttgttcttcgtcgggaaccagctcattgctacaagccacacagggcgcatcggggtgtggaatgccgtcaccaagcactggcaggtcagagttctggccagcctggctgcccccttcccagttttccagactgtacagacccaggaaggggttcacgtctgcccccacccccaccccctaagcctggaggaagccagagaaccagcagctggccagagcctggggatgtctgtgataaaggcctaaggagcaccagggaagccttcctggaggaggtgctgcagagcccacatgaagcatgaatgggtttgaaaaggagtagggaggattgtcttgggactgggtgagagagcaggttaggggggatgctgtagaagacaagaactggcttggctcggtggctcacacttgtaatcccagcactttgggaggctgaggtgggaggatggctttgggagaaagacagacagaggcagagaaagagacagagaggcagaaaaccaggcaaatagaaatagaaaatcagaaagaggtgacagagaagggtagacagagtcaaaccagactgaaccactgtggcagatgggggaactcagagagataaatggagatgaattagagtcatgtcagaagtacatagtggaggccgggtgcagtgactcccgcccgtaatcccagcactttgggaggccgaggcaagaggatggcttgagcccaggagtttgacgccagcctgggaaacataataagactctgtctctacaaaaaatttaaaaaattaaaactttaaaaagtacagagtccaggagaggccaagagtcagacagacagatgcatcaaagggaggaagggagggaacaagacagggacaaaggcaggcctggggtggacggggctggggagcagtgggtgggttctggaggtggaggagagggcccatcctctgtgaggggtcaccacggaaggaaaggaatggaagggctcccggctgcagcctgtcctgccccacccccaggtccaggaggtgcagcccatcaccagttatgacgcggcaggctccttcctcctcctgggctgcaacaacggctccatttactacgtgggtgagcagcagcctgtgtcccgggtgcccgagaccctcccctgggagaggggaagggagggagagaggctggggcacttggaacaaacccgctccaccctccctgcccaccccagatgtgcagaagttccccttgcgcatgaaagacaacgacctccttgtcagcgagctctatcgggacccagcggaggatggggtcaccgccctcagtgtctacctcacccccaagaccagtaagctatgacccggcttcccctgctgctgtcacctgccagccccagccccagcctgcagctgtcccccaacttgtgtagcatgacccagaggggtttatcgaggggcggcagattcaactctctctcatttttttttctgagacagactctcattctgttgcccaggctggagtgcagtggtgcaatcttggctcactgcaacctccacctcctgagttcaagcgattctcctgcctcagcctcccaagtagctaggattacaggcgcccactgccacgcctggctaatttttgtagttttagtagagatggggtttcaccatgttggccaggctggtcttgaactcctgacctcagatgatcctcccgcctcagccccccaaagtactgggattacagacgtgagccaccgcgcccagccagattcaactctcatccagtcattcaacaaatatttactgagtatccctgtatataagcacgttctaggtgctagatggtggccaccctctccactaggggcagaatggaccattaggagttaatctttgtgtttctttcccacctttgtgattaaggcatgatgttcacatgttcataaaacaacacagatgcaggttttacagcagatgaacctgagttctcttacttgagacagttttttgttttgttttcttgacatcaaatgcagaatgggttaatttttgagacgtaattctcataccataaaatttcccatttgaacgtgcacaattcagcggattttagtatattcacaaggttgtacaactatcaccatgaacaaattccagagtatgttcatcacccccgtaagaaaccccctgatctttagcagtaactccacatttctcacttctgataccctctagaaatcactaatatgctttctctttttgtttgagacaaggtctcgctctgctgcccaggctggagtgcagtggcatgatctcagctcactgcaatctctgcctcttgggttcaagcgattctcatgcctcagcttcctgagtaggggaggattacaggtgtgcatcaccatgcctggctaatttttctactttaagtagagactgggttacgccacgttggccaggctcaatatgcttcctatacctatggatttgcctgttctggacaattcctgtaaatgggatcatacattatatggtcttttgtgtctgcatttttcacttagcatatttttttaaatggttagtgttttctgggtcttaagatatccttacctattctaggttacaaagatcttctcctgaatttcttctagaagatttacagtttagtttttacatggaagtctgttctatcagaaattaaattttatgtatggtgtgaagcagggattattcttttttaaaaaaaaatagagacagggtcttgctctgttgcccaggctagagtgcagtggcatgatgtgagttctctgccacctccgccactcgggctcaagcgattcttctacctcaacctcctgaacagcagaaccacaggcatgcatcaccacacctgtctaatttttgtatttttttgtagagacagggttttgccatgttgcccaggctactcttgaactcctgggctcaagtgatcctcacactttggcctccaaagtgctggaaatacagacttgagtcactgtgcttggccatagctgctgctgctgcttttcttttttttttaaagcagaaataagttaataatacacctaacttcatgacacattatcacctttcttctttgtaaggcccttttcttatttcttttttttctttctttctttttttttttttttgtcttttcctgagacagagtatcgctctgtcattcaacccaggctggagtgcaatggcgcaatctcagctcactacaacctctgcctcctgggttcaagcaattctccagactcagcctcccaagtagctgggattacgggtgcctgccaccatgcccagctaatttttgtgtttttagtagaggcagggttttgccacgttggctaagcaagttttgaactcctgggattctcctctcgtcgtctcccaaagtgctggaattacaggcatgggctgctgcacccggcctctttcttatttcacttacttactcatttcctcctcatctcccttcccgccacatgccactattatgtcatttttctttgttttttgagacagtctcgcttcgtcacctaggctggagtgcagtggcgcaatcatagctcactgcagcctcaccccctgggctcaagtgatcctcctacttcagcctcttgagtagctgggatcataggtgaatgccatcacacccaactagttttttaaaaatcttttgtagagatgagggtctcactatgttgcccaggctggcctcaaacgcctggcctcaagcaatcttcctgcctcggcctctgttctctgttttactttctctttcctctcttatttgctgtttcactgttacaatttctgtctctgggcctctcctcctttgacctgtgcctttgtctccctgttcctccatttcccacatctcatcaccatctttttgtgtccttccctctctccttgctttctgactgtgtctctgttctgtgtctctttctttctttctttctttttttttttttgagacagagtcacattctgtcatgcaggctggagtgcagtggcgtggtcttggctcattgcaacctctgcctcctgggttcaagcaattctcatgcctcagccttctgagtagctgggattacaggtgcgtactaccaccaccagctaatttttgtatttttactagagacagggtttcagcacgttggccaggctggtcttgaacgcctgacctcaagcgatccacccgcctcagcttcccaaagtgatgggattacggcgtgagccaccgtgcccggcctctccttgctttctgactgtgtctctgttctgtgcctgtttctttctccctgccctggtttctgtctctgtggcccaggccctctcctcatccttggcccctcaccaggtgacagtgggaactggatcgagatcgcctatggcaccagctcagggggcgtgcgggtcatcgtgcagcacccggagactgtgggctcggggcctcagctcttccagaccttcactgtgcaccgcagccctgtcaccaagatcatgctgtcggagaagcacctcatctcaggtgagcctctgtggggtgctccagtgctgggagagacagctcagatgggagtgtggagacaggaggatgagaatttccactggggagggacattgtgtaggaagagagctctggcggagaggattgacctgggatgggactgtaattgcagaagtgagagaataccataggggatcagtctggggaagagtgaatctgtgtgtgtttgggaatccatcaattcagcaacgatttacggggcacccaccatgtgccaggcataggggatacagtgatgaacaagacaggccaagtccctgccctcgtggagctgacattctagcagcgatggcagacaataaatctataaaaatggacatcaatggccagctgcggtggctcacacctataatcccagaactttgggaggccaaggcgggtagattacttgaggtcaggagttcgagaccagcctggccaacatggtgaaaccccacctctaccaaaaatataaaaaattagccaggtgtggtggcacgtgcctgtaatccccgctactcgggaggccgagggaggagaattgcttgaacctgggaggcggagattgcagagagcccagatcatgctactgcactccagcctaggcaacagagcgagactccatctcaaaaataaatagataaaaatgcaaatcaggctgggcactgtggctcatgcctataatcccagcactttgggaggccaaggtgggaggattgcttgaggctaggagtgtgagaccaacctggacaacaaagtgagacattgtttctacaaaaaatttttaaaaaattagccaagtatggtggcatgcacctggggtcccagcttcttgggaggctgaggtggagggatcacttgagcccaagagtcaggggctgcaatcagctatgattgcacccctgcactccagcccaggcaacaaagcaagactctatctcataaaatattaataaaataatctaaatcaacaccaggcaatgataagggctatgaataaacatgaagctgtgtgtggctagagagtgtcaagtcgctggagaggggtcattcagggaaggcctgaggaaggacctttgagcagaaataacagaatgagcagtgcagattggtagggacaagcattcaggccgagggaacaggcattgcaaaggctctgaggtgagaggatgcctgaggaagtgcagggagccacttgtgcctggaacagagtaaatgagggggagaatgggaggagatgagggtatggaggtgacaagggcaggagccacagagggctccgagcaggggagggacatgactagcttcaggtgttcacaggctccacctggctgcccgtgggagcacactactgggataggacaggagcagggacctctgggaggggcgtgctgatacggtccaggcaggtgacgaaatggaccaggaccggtgtggggcagaggatagggcaaggtgagatcaggctctggaacagttttggaggcagaggcaacagggtttttaacatttggaattctggggaggaaaggattctctgaaagggaagaactcagcaagggctgaccctcctgaaacggggctgtcctgaggctctggacgggcaggcagcattgatgcctgcaccaggcctgacttcctgctctccttgtgcccctcagtctgtgccgacaacaaccacgtgcggacatggtctgtgactcgcttccgcggcatgatttccacccagcccggctccaccccactcgcttcctttaagatcctggctctggagtcggcagatgggcatggcggctgcagtgctggcaatgacattggtgcctactggctcctggccttcccaccccactgacccccttacctgacccctgttgacctccgctgattcccacttgcggccacctgacccaggagcctgcaacgattggggtgtcctgatccttgaggcacctgagctccactgactgccacaaccccccagccctctctggccctgcccaactctaacaacctggggatgggactggggtcttggggtggtgggtttcatcagtggggaaggaagtctgaggctgagggaatcccagctggccctgacccctgcccctgcctggcccaggcccctacggtgagcgggacgaccagcaagtgttcatccagaaggtggtgcccagtgccagccagctcttcgtgcgtctctcatctactgggcagcggtgaggacagtcctgtccaacagggagggaggacagtcctgtccaacagggagggaggtcaggggagaaggcaagatgctagccagatcactgaggccagaaaggggtcccagccaaggagcattgaaggagcaaaggctgggagggaggacaggcctggtaggtttgtcttctggtatcaaaggtgtgacaggtgttggtgggactgacctggcgcagtgccagcccagtgcaggcagggccaggttgaaggcacagggggtggggtcagggtgggatggggggcccaggcggagggggaggggtgggatgggggcccagggggagaggtcggggtgggatggggggaccagggggaggggttggggtgggatagggggaccaggggcaggggtcgggatgggatggaggagacccagggagctgtaggagccttgcttcagctgggaaaggggcctcggaggatgttctggatgaagggactctgagcagagacctagaggacaagtaggaaggagcagaagaaagaaggcaggggaagggggccccagcctgagggaactgtatgtgcagaggctgagaagggccaaatagggtcacatgggaaggacacgtgggctcctgggctggagcacagaacaggaggtgaggatggggtgcagatgcgggcgggccttgtcaggctgtggaagggctgaggctttgtcctgtgcggggagccgtggccactgcatgggggatgaaaggaggcttgatgggaggccaggagcccagggaggaggccaggaggctgataggaggtgggggagcagctgggacgggcctcaggtcttccctgcagtgggagcagggaagagcagaagctctgggagactccctgggtgtttggggctgcggtgtccaagagctgctggacccttgggactggaactcaaaagcaggctagggatggataaagattgggatggcccctggagaggcaggaactgcagccacagtggtggggactgggacgaggaagggtgagaaagcgagggtgaccacctcccccactgcaccccccagggtgtgctccgtgcgctccgtggacggctcacccacgacagccttcacagtgctggagtgcgagggctcccggcggctcggctctcggccccggcgctacctgctcactggccaggccaacggcagcttggccatgtgggacctaaccaccgccatggacggcctcggccaggcccctggtactccctgccccaccccaatcccgtcccaagccccacagcctcacccagaaccactctccactgccaactgcttgatctctctcccaggcccttgccctctgaccccttttcctttgaccccctctctgctccccatcccttcctgcccttgtttttcaacccctgtctcagcctctggcccccatgcattgatctctgcttcctctctcctgtcctgaccctcggtgcttgcactgcaatgcaacccaggcccttgccctatgacccctgtcttgccccctgaccctgcttccgtgccccccagcaggtggcctgacggagcaagagctgatggaacagctggaacactgtgagctggccccgccggctccttcagctccctcatggggctgtctccccagcccctcaccccgcatctccctcaccaggtagccacaactccactgccccttctgtgcaatgaggggagaggggacagcatggtgttcccggggacagagtggcccagctgccccgtgatgacgtgcacttactgtccttacttcctcagcctccactcagcctccagcaacacctccttgtctggccaccgtgggagcccaagccccccgcaggctgaggcccggcgccgtggtgggggcagctttgtggaacgctgccaggaactggtgcggagtgggccagacctccgacggccacccacaccagccccgtggccctccagcggtctcggcactcccctcacacctcccaagatgaagctcaatgaaacttccttttgaacaacgcagctgccatgatgccttgggatgccctggtcctgggggactcaggtgcctccctgattcctgtgggaaccccgggttcagggccagggcctccttggaataaatggttattgttactaggtccccaccttccctcttttctggaagccaaagtcaccctccccaataaagtcctcactgccaacatcttgcttattcttagcaggtttgggactccccaggaaaggggtggggaagatgtgggacccaacccgatatatgcaaaatcaggaacatctacctctcttgtttaagcaaagggaggccaggcatggtggctcacatctataatcctggcactttgggaggccagtttgcttgtgctcagaagtttcagactagcctgggcaacataacaaaaccccatctctacaaaaaaatacaaaaattaagcaggcatggtggtgcatgcctgtggtcccagcttcttgggaggctgaggtgggaggatcgcttgagcctaggaggccaaggctacagtgagccatgatcacaccactgcactccagcctgagtgacagagtgagatcctgtctcaaaaacaaaacaaaacaaaaaaggtgttgcaggggaggaatgtgttggcttttactctgccttcaggcatggctggatccggggcttcaaacactaattcagaatatctttttttcttttttcttttcttttttaaagtctcactctgtcatccaggctggagtgtagtggtatgatctcagctcactgcaacctccacctcccgggttcaagcaatcgcaatcctcctgcatcagcctcccgagtagctgggattacaggtgtgcaccaccatgcccagctaatttttttatttttagtagagacagagtttcaccatattggccaggctggtctcgaactcctgacctcaggtgatctgcccacctcagcctcccaaagtgctgggattacaggcgagagccactgtgtccggcccagaatatctttttatctcctaacttcacttacctctggaatacatcttcaatcaggttttctctctgtggcaaggtgactctaagcagctgcttagcaactctttcttccctagcaacagcaaaaatcacaagactgattttcattggcttgaattaagtcaggtggccattcctgaaccaattactgtggccagtgtgatgaaggccttccattattgcagcctggatcatgtgtcctgctgtatttttagtagaggcagggtttcaccatgttggccaggctggtctcaaactcctgacctcagatgatccacctaactcggcctcccagagtgctgggattacaggcgtgagccacctttcctggctggccttgggattttttttccccaaataatgcccgttcctacggcacttccttgaggagattttctgcatcttttttccttgtgccaataaaaaagggacagaaagtggggacagactaggagtagagaatactagaacatgctaattctagaattccatagtttctggaatgccagagcttctgaaacatagtagagaggggtctcgaacattaggacatctcggacacaaggatattctggagtgctcatggattaacaatattagagttctcccctgcttatcagagaatccagaatatagaagtttctgacaaaaaggacctgaaaaatcactgattctagaataggggagtgtcaaggggagttcatacccatgaatctccaccggtaggaatatcttgcatgccaggatgtctggaatgctgagaattataggatacagaaaggaacctggattactaggaaatctagagaatgggagagatcctggactatccgcccttccagagcactggaaggtttgtttgcgttccaagaaatccataatggcaggagattccggattatcagagaatctggaacacaaatgggagacgtaaaaggtgagtgcctctgaaaccggggtgttctgaaatagctgtgcacctcaaaccctaattttgtttttgtttgtttgtttttgagacagggtcttgctttgttgcccgggctagggtgcagtggtgcaatcatggctcactgcagcctcggccttctgggctcaagtgatcctcctgcctcagcctcctgagtatttgggactacaggtgtgtgccaccacagccagctactttttaagtttttttgtagagacattgtctcactatgttgcccaggctggtctcaaactcctgggctcaagccattctcctgccttagcctcccaaagtgctgggattacaggtgtgagctaccatgcccagcctcacactctagaaaattttttacatgccaggatattcagaatattgggggatattggcatgttaggaaatctagtatgtagggggagggcctggaaggtcaggaaatctagaatatggtggtgttttgtaatgctcacagatctagaatattagagtcatttttttttccaggccggagaatccagaacgctcgtgttgctgaaatgctggtcattctattcttatttcatgtttaaatttttattattttctttatttcttttttttgagacagggtctttctctgttgcccgggttggagtgcagtggtgtgatctcagctcacctcaacctctgcctcccgggttcaagtgatcctcccaccttagcctcttgagtagccgggattacaggcgtgcgccaccatgcctggataatttttgtattcttagtagagacagggtttcactgtgttggccaggctggcctgaaactcctgacctcaagtgatctgccctcccacctcggcctcccaaagtgctgggattacagacgtgagccggccttattctgggggagggggtggggggggagagagagagagggagagagagaggagaatttgggatgttagcaaatctagaacactgaagagctgggttttttaaatgctagagatagtattatcctagtatagtattaactctgtgtgtttttgtgcgtgagagggcatggggggaggggtggaagattctggaatgcggggggactagaactctgagggattctgaagggttgagatgagttaggattcaagaggtgacatagacacgatcctgggagatagtgacactgatgggagggatggggagctggggactccaaattctagggggaggggaggctaacgccggaagttgcagtggtgagccagaggatgttgcctagcaacaagcattgaagatgcgctggatcccggacagaagggagaaatttcagcagcgcccccagcaaatgctccagccacagggtaggaggtggtgaggggggaagcgggtagggatatgctgtcctgcagggtcatgtgagcaggggtcttgggggttatacaaaaacagggtcatggagtacagtcatggggcagagccgggctctgggacagcccacgaatagctgtgaatggagtgtgagtgccgtcgtcacctgccccagggactgtgtgtccctggacggtgctggacccagatttctgggtgtcagtgtgggatggaggcatggattgctgtaggtggcagtaatggtgtgtagccgtgtgagtcagcctgtgtgtctcacagtgagcgggggtgaagggcttccccgtcagtcctgcacaccctcctggattggaagaaggagcaggagtggggggtggggggtgcaactggatcagttgccattcttggtctggggtgggctctgtggtcacggcgtgtggcctagtaccctgtgtgggtggagcctgggatccacgaggtgggggcggggctaacgctacagaactgggaagcttaagaatccaactgctttgggatatggggcctggaaccccaaagcgaagcaaacatgaaaggggtgggcttgggatcctacatgtggtcacgtcccagttttctgtgggaaagggtgtggcctgaaactctggaaaaagaggtgattaggggcagagtgaagctctgagggtggtgccttagggagagaaggggcttgtatttcagagaatatagggtggagccttgaatttataatgatcttctcaaagaattgatcccttctcaaggccctaggcttcaggggttccaggctcaccatctgcaaaagcttgctccccgaagctctgtccctcagtgaacccagccaggctctgcccctgacccacaggatctgctcccagggggtcctgggggctcctggctctgccccctcctgcacctcacttattgccatccccagagggtatcagacccccttccttgcctgagtctttgaatgctcccaagagctttgagtctcaagctgggcttgagaccctgagtttgaaggcttgaagcctggaaccccggtgtggacggggtttaagggcccctgtggcttgcagctcctagtggtggagactcttaggcaaggaagggatcggtactctcttttatatagttttatgtatttatttattattgagatagggtctcactctatcgtccaggctggagtgcagtgcagtgcagtggtgccatctcaactcactgcagcctccacttaccaggctcaagtgatcctcctacctcatcctcccgagtagctgggactactggctcatgccaccatacccggctaatttttggatttttttttttttttttttttttttttttttttgagacagagtcttgctctgtcgcccaggctagagtgcagtggtgtgatcttggctcactgcaacctccacctcctgggttcaaacgattctcctgcctcagcctcccgagtcgctgggattacaggcgcccaccactgcacccagctaatttttgtattttttagtagagatggggtttcaccatcttggccaggctggtctcgaactcctgacctcatgatccacccgcctcggcctcccaaagtgctgggattacaggcatgagccaccgcgcccggcctaatttttggatttttaatagagatggggtcctatgttgtactatgttgctcaggctcacctcaaactcctggactcaagcgatccacctcggccttccaaagtgctgggattacaggcccgcgccagggcacctagccggaactgggaactctctaaggagaaagtctgcaattctgggtggtgggaggctgctcttgggagcattcaaagactcaggcaaggaagggggtctgataccctctgggggcggcgataagtggggtgcaggagggggcagagccaggagcaccctgggagcagagtttgtggatcaggggcagagcctggctgggttcactgagggacagagcttcggggagcaagcttttgcagatggtgagcctggaatccctgaagcccagggtcttgagaagagatcaattctttgagaagatccaatgtgaacttgggaccctcagaggggcaggacctgggggctggtgcagggttggtgctccatttgcagaatcctcagtctctctcgtggaaaggggtacccgtggggggcttccagcttctacgccagcgagggagctaaattctgaccgaattctcccagaactgggagcagagagctgaggactgccagatggagtccagcttaggggaccctgcccccaaccccgctcccgtatccctcccatttttaagcacccctacgcctgggacctctgttccacgagaaggttcacggagccagtatccgagtcctaatttccccccaccgcgtggggaactcgaggtcccccgcgcccctagtccggcacctgtccctgctgcctcctgattggccgcgcggcgagcgctggcggcgccgggctgtgattggcgggaagttcgcagcccgtggctggactgtggagaaagtgagtcggcctcgggcgggggcgggggcgggggcaggggcggggccggggctagcctgacccgctggacagaccgcccgcccggagcgggactcggcgcccgacacgatgccgaggcctggcaccagcggccgccgccccctcctgctggtgctgttgctgccgctcttcgcagccgccacctccgccgccagccccagccccagccccagccaggtcgtcgaggtcccgggggtccccagccgcccggccaggtaagccccctgcttccttgtgccccttccacccaataagtctggtggtccaggaggaccacggctttcggattcaggggaaactcgaacccactgcttcgatgtggagatgcaaagagggcccttggatttattaggcgccctcaatttgtaggggttagattcggggagtactgagatttttaggggaaagagtcccctttattgtggtggagaaggctaagtctccagagaatcctggggttagttcggggaaaggtctctagtttattggggcagggggtggggggctgagctctcctagaatgatagagacgtgtggggtcttcgagctaggatggagcgccccaagtttcttgggcgcgtaaggaggaaaggtgttgggggattctggagggactttatgaggccgctgagttgtcctggttttctaggatttgggggctctgtgttcatgaaaagcgacctttgggtttttcgaattggtcaggaagacatagactcttgcgttgatggtggaggggcttgtggggagtggggtcgggtgggggagtcctcaggcttcagaacggttggggatgctcaagtttcctagaattagaggactctgggattgaatgaggctccagtgatttcaccgcgagagatccaggattccctatagatctgggggctataggcgcccttcctgtctgcgggtgacgggactgaaggaagccgtctgcccagcacccccacccaccctccccgcctggcggcccagcgctccgttacaaaggccccgggctcctctcccgcctgggtctctgcgaatgcgtttagtaacccgagccgcggcgggggcggggccgggaaggggttaacctggagaaaaggcgggagggatgacggcaagatcggggatccccgaggctccccaccagatggcctcatcctccactcggccccacccacctgagaggggcccacgcgctggacacccccctctctgcacccccccactgctctcctctcggggtctgggcgcgcgccctcgtctctagacccccttagcctggggataatggacttgtctggggggccccttcattgcgacgcacttgaaccggagctggaagctccgccactgagaccctctgggctgggagatgtctgcaagaacggcacctttctcctggtcaggcgggaaactgaggcccaaagaccaagaaacgctggcttctggacacacatcgtggaagggcaagaacgggctagaactcaggctctgggattctcagtcctggactgtgactcccgttatccccctccacctcagcaccctgctggacccacagtcagagggaagagccttccctccccagctgccgaggcctgtgaaaatggcgccacctgtcggccaggctcaggatggcgtctgagtcccggaccgggatgtgcgggagggcggggttctagattcccagacagtgcgggcttagaaatgctcttagaaatcgagtcttttgtttttgtttttgttttttaatcacttttaaaaggctttaaaataacgtattttttcaataaaatcgtacgccaaaatctcttcataagacaaaagtacggtttctgtgcccttcagcccgaagtctaagccaatttgcctcccattgtacagatggagaaactgaggcgtggggagaagaacctcgttagtcatatacctgtttcaagccccctcaggatgcgtcttggtttcccctccccgattgccctcctttgcagagttctggggtgctaggggcctgagtgacttccactccactatttatagcgttgctgtttgtcgctgctgcccgggccagacgtctaggaggagccgctgcatccgaggtgggttctggaagatggagtatgagtagggggcaaaagggaataggaggagaggggcagggagctccccatccctcccctcatcccagtgggagagctggatgcatttggtagagaagtacttggtcccctccttccccacttagtccctggctgtctccgaagccttctgcagggtccgaagctgccagcccaaaaagtgtgcaggcccccagcggtgcctgaacccagtgcctgcagtgcccagtcccagccccagcgtgaggaagagacaggtgtccctcaactggcagccactgacgtgagtgggcagtccctcccctaccaaatcctccctcaggaactcctagctttgcccccgtttccgctcctcctcccttcccctctccctctctctcccccctccctccccggctctttcttttgctatcagcctgtctgtccgtttctatttcatcccttgcctgcctatctcaggctcttcccatctctgcattatttctgtctctttctgtttctttctagttacctgtctcttttcctctctctctttctccctgtgtctcactgcctgcctctatgtctaagtctctctgccccttctctctttctctcccccaacccccatcatctctctttctctcagggtctttgtttctctcccactagaggcctggtccccataaataggtgttgtggggggagggttgggcagagccgctactgaaagacattttcctggcatggaggccctttggtggggaggtcagtttaacccggtgacagcagcttttccgtcctctcccacccaggctccaggaggccagagctctactgaagcggcggcggccccgggggccagggggccggggactactgagaaggaggcccccacagcgtgcccccgctggcaaggccccgggtaagcacatccgcctttcctccgcctggggcgaggggggttccgggccagataaagccgtctggttcccacggtccagccgccgcctacccgccccccgttgtagctcagcacccacccccaggacgaggccccctctagggaccccagcgtccggccgtgcgaggtgagcccgggacaggaccagacacaggccagaggcactgacccgcgggggtggggccgggaagccaggcgtccgggctccccgcggccgaagagggagggcgctggcccgttagaaagctccgccgaaccagcccagacaacaaaagcgattgtgcgggttggcgcctgcctgggcaccaaatgctcaagattgtggggcggctgggggccaaaggcctcctcctgtttcccgaatcttccccctgccctcctcccgctccagctcttgacccctagtctagaacacccctcatctcaaacaccctcaaaaccctcctcttgctgtagccttcagcccagatgtgacccctccccctaaagtcttccagatgtgagcctcgggccagatgttagtacccccgcccacagcctccctttatccattgtgacttctcccgccaggtgtggcgttctggccagatgtggctacatcttcacatgtatcccccccacctccagcctcctgcccaggatctagacgcccaattcctttatgtgcccaggtgtagcgacccttctcccatccctcagatgtcccacctggctgtccagatgtaccatgatagccccctatcaagatgaagcccctttctctgtgccccgggcagaagaggatcaactcttagctgtctccccaaatgtggcccccactactcttaatggatttcctctttatggattcagctctgtctggggggaaacccgcccgcccccacctgttcccttccccgccgctcccctacaggcccggtccacttgttggtgcgcggatggggacagagggggcgccccgctcacccctgcgagtctagcgcccagcctgcgagcctctggctaagcgcccagccccacgcgcccccgcgcggccgccggggagggagtggtgaggagggggggcctgagcgggggcgcgggcgacctcccccgcgggcgggcgggcgggtgcggccgggcccctcgggcgggctggggcggcggcgcggcggagcgcggcgctgcagccatggcgggcggcgtgcggctgctctgggtgtcgctattggtgctgctggcgcagctagggccgcagcctggactgggccggctcggagagcgtctccgcgtgcgcttcaccccggtcgtgtgcggcctgcgctgcgtccatgggccgaccggctcccgctgtaccccgacctgcgcgccccgcaacgccaccagcgtggacagcggcgctcccggcggggcggccccggggggacccggcttccgcgcctgtgagtgcggggtggtggtcccgagagagcggctccgggggggaggaggatccctggggatggaggagacagtcctccagggagagggagcccagattccatatgcaatagtgcaagggaatatcaggggctatttgaggaagggggccccaaattcctggcttttggggttgggtcctgagggttccgattttgcaagcaatgagggttcttagaggcctgtgatgtcccacgtgagggaattggcgccagctttcatgctttgcgtcaaaatggggatctcagaattgaggggcctgagaacttttgggaggggggctcgaattctgagacgctgagtaaggagtccccggggaccaagcaagagtctcaggaccgcatgggggacgtctcagtttctgtgtgtttgggtgggaaggttctgtatgggaatgcctgtgaggtggggtactagagagaagaaagttaatccgaagaactaagagggagaggggacagagacgggggttgtgtgtgtgtgtgtgtgtgtgtgtgtgtgtgtgtgtggcggcgggggtggggtgggggtgtctccgcaggacctgagttgcaggggtcccacgtgcgacagaaatccagataagagggcttacggaaggggcgccccctgggggcggaggggacaggaggtgtatgcaccaggcactcctagagatggggagccttgggggttcaggtgaggtgggggagggcgcaccacctgttgttccaggatgcaaaagtgggcagactctctgggatcgggccttcctgccccctaccccgcagaccctatggagtggggagtgggggcccctggagcggagaactcgcccagcctggcccccagccagcccagcccggccggcgtgagctcatctcccgcctgagcccccgcccgctgccactccctctctcctccccttcctccctctttctttcactctttcccggcccagccccaacgtgcctgtgccaggcgccatgcccaggcgggtgccaagcccttgggggtgcaaggagtggcatgtgaagtgggggctgacctcaaagggacccctatgtcctcaactccccgcttggccagggctgtggggcatgacgttggctgtggccatctagtggcccaccctgggtgtaggcacccccagggagctggcctgcgggcctgcattcaggccaagagaaggcagagaaatgcctctggagcctgggaaataccctcagacctggctggtttcccaccccctccatcagagacccttaccattctgcaattttgattcctagttaagcctctcctaggccccactactcaattaaaagcccccattagaccaccctggagtcatggccccacactcctacctaagggagctgagtttttgctccaggccctagacccgctctccaaccatggcaacagactttagagaccactcctccagtgaaattccctctcattcttccctcccacctcccaaactgtgcctttccccagataactctgtagtattgtccagaagtcctgttcttctagctcacccccttccccaggaacttctgatcccatttatcttcagagaaccccagggttggtcttgataagtgggttctcgcaagaggactccagacattgtgctccttacaggcagccattaataaaaagcctttggcacttaatccttagctgggaggggaggggattccacagagggactcggccaattgagcctcttaagtgctgatgacttccaggaattccacttcactatctaaaccctgttttcagcaccgtcaaactggttgtctcctaggcggcactagagtcctgttttctaggtaactgtccacaaaaggactcctgctgaaaggacgcctcagtttcctctgagctaggttcctccatcccagaaacctccagccgtctttgaactcgagaggactgccctttagtcgatctcctcccaggactccagtccctttatccttctaaacggaggtggctctctgcgtcctttcctctctacagttgtggctcagaatcccacacgcgcctcccccggccgcctgcctcctccctcccctccgcacagctgtctccagctgttctctgcagccccgggagagagagggagggggtgccctcgcaggacagcccggcctcctttggctcaaaggtcccggggctccccaagggtccggaatgtggagcctccgccctgcccccgccgcacctctctctttgtttaccccgccgcacagctggcagtgccccgcccagaggtggcctggggcccagcgagggcgcgcagaggggagtggaggcgcgttcccgctcgtggctccgccccggtgctactggaggctgtaaggccgagctagaactctaaagccccagccagaaagaagttgggcggagacacagcgcggtgggcggaactagggcacccggacagcctggaggtggggtgggaggggcgtgaacaagtgagccgggcgaatcagagtgcggaaaggaaggtgggaggggctagaggcagcaggttaagctcctggataggcggggtttagaatcccgcgggtagaaggtaatgtgagaggggctacaaagggggcacagccagggggcggaggtaggacttcgtggaccaagcagagggagtgtgggcgggcatagaatgcgaaggagacagagttgggcggggagttatgccagggagtggttaaaatgtggtttgagtcaatggaagggatcagcattgggtcggaggggctggaacagcaaagggttccgtcggactacggaatgggcggggtcagcgccgtctgggctggtctggaactccgtggactcagccagaaattgggatccgagaggttgacatgaaagtgaataaacagcctgagggctggctgggctcacgcctgtaatcccagcactttgggagactgaggcagaaggattgcctgagcccaggagttcaagaccagcctggccaacatagtgagaccccgcctctaccaaatttttaaaaaacgtagcccgatgtggtgcacgcctgtcgtctcagctacttaggaggctcagatgggaggatcacttcagcttaggaggtcgaggctgcagagccataatcacgctactgcattccagcctgggcaatagagcgagatcctgccgacttagtgggtgggaccgtacctctgatggctgaacaactggactgggccaatgctgatgccagaattggggcggggccacatgacagctaagggcggagcgacttagaaatgaatgataccttgagggagtagggaccccaggagaacctgccaggaatggtggcgcccctgagtgtcctcgttctcctcccagtcctgtgtcccttgatctgtcacaatggcggtgtgtgcgtgaagcctgaccgctgcctctgtcccccggacttcgctggcaagttctgccagttgcactcctcgggcgcccggcccccggccccggctgtaccaggcctcacccgctccgtgtacactatgccactggccaaccaccgcgacgacgagcacggtgaggaaagggtggccagagtcccctccgacccctgtcaagcatttcactttgcccctgaccctcatatttcccgccttcccgagcacctttgcccagctcgccctccccgccttgtctagccccaccccgtaagaacccgtgtagacatccgtttgcccggccgtgcctcccctaggcgtggcatctatggtgagcgtccacgtggagcacccgcaggaggcgtcggtggtggtgcaccaggtggagcgtgtgtctggcccttgggaggaggcggacgctgaggcggtggcgcgggcggaagcggcggcgcgggcggaggcggcagcgccctacacggtgttggcacagagcgcgccgcgggaggacggctactcagatgcctcgggcttcggttactgctttcgggagctgcgcggaggcgaagtgagaggaggcccgtggggaggggcccggagcttgcctccgcgcgggggcgcgctcacccaacacttccccgcagtgcgcgtccccgctgcccgggctccggacgcaggaggtctgctgccgaggggccggcttggcctggggcgttcacgactgtcagctgtgctccgagcgcctgggtaagccccaggacgtccccgaagtgctcggagctggggagtggtgacaacctcaccgttcctcctactctgccctagataaacccagttcacaaattgtagccacgcctaccccattgtggaggcgacttccagtcctgagcttttcataccgctctgggaccacccaccccattttctgactttggccactctgttctcaccctgcctttgtgccttggccccccaccatatactttgggagtctccaatgttgccatttcaactgccaacctaaggctgtccctgcacttaaactacagccaacatcttttagtccctcccaccccgtcttcgtctctgcccactccattctcgctctgcccacctgtccctggcccacccctctcctctcgccacagggaactccgaaagagtgagcgccccagatggaccttgtccaaccggctttgaaagagttaatgggtcctgcgaaggtgcaacggggcaggggtgggaggggcttggttctgggggcgggatttgcagggatcaagttcctgactccacggtgacctccccaaccctggcagatgtggatgagtgcgcgactggcgggcgctgccagcacggcgagtgtgcaaacacgcgcggcgggtacacgtgtgtgtgccccgacggctttctgctcgactcgtcccgcagcagctgcatctgtgagcaaccagcagggagctgaggctgggtcccgccctccctgccctcagaagtcccagagcatcctggggcctttaattccctcggacccccccagactcccgggttcctctgtcagccttagagccccctcagaacttctcagattcttatacagcttcagcatccctggaccacctttagacctttcaagccttttggatccagatccctccagactcccagacttttttttttggagatggagtctcgctctgtcgcccaggctggagtgcagtggcgcgatctcggctcactgcaatctctgcctcctggtttcaagtgattctcctgcctcggcctcccgagtagctagaactacaggcgggcaccaccatgcccggctaaatttttttgtatttttggtagagacagggtttcgccacgttggccaggctggcctcaaacccctggcttcaagtgatctgcccacctcagcctcccaaagtgctgggattacaggcgtaagccactgcgcccagctctcccagactttctggaatccttctcagacccccaaatcctctcgtccccctcaacgactcgactatcttcagatcttgagatccttctcagagtctctcattcaccactgacaccccattgaggctccaagcccttctcagacctccagagcccactgctctccttcagaccctctcagacctctcccaaatgcccctcgcacccaccaaccccccacccccaaccccagaaccattcccctctctcccaaatccctcagtgctacagcattcccagccccgccctgaaggatttcctccctgctcctcgcagcccaacacgtgatctcagaggccaaagggccctgcttccgcgtgctccgcgacggcggctgttcgctgcccattctgcggaacatcactaaacagatctgctgctgcagccgcgtaggcaaggcctggggccggggctgccagctctgcccacccttcggctcaggtgagcccctgcggcagtgcctagccctacgcgcaacacatgtggcgctcattctacgccccaccctccaaccctgagttcactgccccaacctgactggctgggctccagccttggccacgcagcagcctctgagacccgcaggcctcagactggacagcatccatggctccacctccatctgtagccacagccacccctccattcgtagccacagctaccccggagctcccaagttagtttttgtctcctgagcgtcaacgcccagtcccaccctgtccctgaactttgaccaagtccttggcttctgagacactgccttcagcttagccccaccccaggcatgcccctccctgagacacctccctggcattctatcttctgcttaaaactaaatctcacaagggagctatttcctagcctccaactctgtccctgtagacccaaccggaccctgccctcaaccctgttcctaccaccatcccaaatgtgggaaaacgctcttggccccacctgtagcctctaagacattctactctttggccaggacaccaccccatcccagcctccagctcaaacccctgacactctccagccaagccctgcccctagccaaggccagagtctgggctggccatcgttttcttcccgctctcttgtcctctctctgtctctcttacctattcccagagggtttccgggagatctgcccggctggtcctggttaccactactcggcctccgacctccgctacaacaccagacccctgggccaggagccaccccgagtgtcactcagccagcctcgtaccctgccagccacctctcggccatctgcaggtgagctggctctggcagaagtgggtgccatcttcaaggggctgccccagccccatagtgaaaggaggcaagagaggatttgggctccactcgttgataccccttctttatcaggctttctgcccacccatcgcctggagccccggcctgaaccccggcccgatccccggcccggccctgagcttcccttgcccagcatccctgcctggactggtcctgagattcctgaatcaggtttgctagaaagaactgagggcattgggcctgcagcagtggctcacgcctgtaatcccagcattttgggaggctgaggagggtggatcaccaggtcaggagttcgagaccagcctggccaacatggcgaaaccctgtctctactaaaactacaaaaattaactgggcgtggtggcagatgcctgtaatcccagctacttgggaggctgaggcaggagaatcacttgaacccaggaggcagaggttgcagtgagctgagatcgtgccattgcactccagcttgagcgacactccatctcaaaaaaaaaaaaaaaaaaagaattcagggcattgatgggggtattacaggtgggattctggggtaaaagactccaaggtgaagattccaggttacagcaaataggaatggtatgggcagagataagcgtttgaagggttgggtggtagttagatcaggagctggagtcacagttgggctcttctgtgtcaatcgagcaagccatttaacctctgagactcagttttctcattggtaaaatggggatggttgttgagatgcctctgaagtgtctgacacctagtaagtgctcagataaatacttatggtagataattatttttcattatctaatattagataattatttctcaggtagggcactaagaatgtatctcaggcggagggttggagagcaaactattcaaagccagagaccttggggtggcatgatgaggggattcggccaaggatctgatgagaacgttccaggataaaaaagatggagatcagaagaagactgggcttgcttggggaggagacatccatgaaggtgttttatggatgtctccgggggtgggggttttactgggatgaaaggaacggaggattcagagatgggggaaccctggctgactggaccccccaggtccctcctccggcatgtgtcagcgcaacccccaggtctgcggcccaggacgctgcatttcccggcccagcggctacacctgcgcttgcgactctggcttccggctcagcccccagggcacccgatgcattggtgagcaagacggagggcgcggaaggaggcggggcggggggctttgcctggtcaccttgtcaccagccccctccgtgtcctcagatgtggacgaatgtcgccgcgtgcccccgccctgtgctcccgggcgctgcgagaactcaccaggcagcttccgctgcgtgtgcggcccgggcttccgagccggcccacgggctgcggaatgcctgggtgagaaatttgccccacccggctccaggcccaccccagggtctcgctcctgctctcactccagagcctctccagccctcccacgcttcccctctcgggtcccgccccaggactgctctgccctggcccttggccctgcccttccctgacccgcctccacccagctccagcctccctttgaccccacccctacccagctcccaaactgccagtttctatcggggcctggtcgcaactcgtattgctccgcccccacgcccaggccccgcccttattggccacgcccctccctgactaactccctcccccaggccccgccactgtcctgcaactgcggcaaccaatctcctgaccgcgaccccgattccaaccctgccacaccagagccctatccccaaactgctcctttcttctctagcccctaccccaccttcccttagcttggtccccaaagctctcctttctgcccttgcgctaccaaaccctgccctccacaattgcctctctcactgtgcccctctccggctgtcctggccgggtccccatcctggctctggcccaagcttggtcccgctcccgcttccctctacccctgcctccttgcgtcgcttctcccggggctgtctgccccagtcccagccgcctggtctgtgcctacagatgtggacgagtgccaccgcgtgccgccgccgtgtgacctcgggcgctgcgagaacacgccaggcagcttcctgtgcgtgtgccccgccgggtaccaggctgcaccgcacggagccagctgccagggtgagggcctgggaggggcagctgggaaggggtgtgagcggttgggtagagcgcagtgatgagggccagagagactgaacaatagggcaaagcgagttgatttggagacagaggccaggctctcgagcagacgtgtggcctgatggcagtagagagagacctgggatgcagaggccaagtgatgggaaacagaaaggctgagtcatgaaagatggagaagcagaatgaggagggatggagatgtcagtaatcgggtaaggggagcagagttatggaggaaaggggagaaggaggccttctcatggggactacagagacagaaccagccaggcagcttagtagggattggtggaggatgcagagtcagatgatggtgacaaggaggaatagagatggggtcacggggacagaatgttggagggtggaaagccaaagtgacagaggtcagggaggcagaggggaacaagtgaccccgggccccctgccctgtgcagatgtggatgaatgcacccagagcccaggcctgtgtggccgaggggcctgcaagaacctgcctggctctttccgctgtgtttgcccggctggcttccggggctcggcgtgtgaagaggatgtggatgagtgtgcccaggagccgccgccctgtgggcccggccgctgtgacaacacggcaggctcctttcactgtgcctgccctgctggcttccgctcccgagggcccggggccccctgccaaggtgagggtgctgagcccagccctactccatcactgtttgctgtggagactggagagagattattgaggggcagagaggcagagtgatggggctcagggatggagaacaggggctgagggatggggacctcactccagagtcttctctcctttcaacaaaataaggcagtcctccccacccctcctccctttttgaaagatactcttgtgcttatgggaaccctgaggagggggtcacctgaggcagggcaggcaacatggagttggtgccttagcccccaccttagtagctggagagaccattgaatggggacacgaggaaggtgtctgtcttcctgggaagagggagcagcctgaggcaagtccagaaggcaggctcaagactggaatgctggggtgggtggtgatggccatgggaatggattcaggccccttcctcagcctcattggtcccctctgccccagatgtggatgagtgtgcccgaagccccccaccctgcacctacggccggtgtgagaacacagaaggcagcttccagtgtgtctgccccatgggcttccaacccaacactgctggctccgagtgcgagggtgaggccggggagggagggaggagtgtggatgggtgaggggggagttggaccacttcttcaaggccaccctctcccctgccccccagatgtggatgagtgtgagaaccacctcgcatgccctgggcaggagtgtgtgaactcgcccggctccttccagtgcaggacctgtccttctggccaccacctgcaccgtggcagatgcactggtgagaccaggccctggctgtgaccttgggcctgcatcatgacccccgacccttgacccagatcacaactatgacctggccgtaacctcctgacctggacctcagtccctcagtccccagagcctgtgactcctgaccctgacctggaccacaactcttgaccctgaatgtgactcctgagacccaacttgacagtaacatttgaccctaaccatcacccttgatgatagtccctgcccataccctgatagcaattgtgaccctcatgactctggccctgaatgtgacctataactcctgaatttgactgtgacatttgaccctaatcataaccactaaccatagcactgaccataaccttgactgtgtgactcttggtcctatctctttcacagcccctgcctcttctcagaatcccttctctggaacctggttgggttcataatccctgaccctggcccctgacttgaggcagaattctggaccctgactataacttctgatcctaactggattcagattccagtcactaactctgacccatggctcagccgaatcccatccaatgatcctagtttataatacttgactggtcccttgccctagttgatttctgatccctgtctgatccctctcctgactccaaaatcctggcacaggtagttcctagaaacctagacccacaggacttgcaaccatggtccccggaacccgagaaccttggtcagccctacccacctctgccatagagccctcccccagcctccaactcatgagacttcccaccacctcccccagacaccctactccaaggggattggtcgggtgtgtcccgagactggaccctttctgaacacccccaccccccacagatgtggacgaatgcagttcgggtgcccctccctgtggtccccacggccactgcactaacaccgaaggctccttccgctgcagctgcgcgccaggctaccgggcgccgtcgggtcggcccgggccctgcgcaggtgagcagcatagggacccgccagagagtctgggagtagggcctgggttccagggcaaagccggctggaaaggtggaggcgggaccaaggcgctgtgggaggagcttagaaacctggcattggtgggggcggggttactgcgatgtgggcggagcttgtctgggaggccgggtcccgtgactccgcccaatctcccgcgtaccctagacgtgaacgagtgcctggagggcgatttctgcttccctcacggcgagtgcctcaacactgacggctcctttgcctgtacttgtgcccctggctaccgacccggaccccgcggagcctcttgcctcggttcgtacccgggctgatcctggccccggaaagggtgggcttagggcaggaaaaggcgggacggggagaagagggcgaaaaggggaaaacgagtttttagccggggtattccagcaggatcagggggcagctggtgggagtctcgaggcagtgagggggggcggggcgtggagatgaaagggccgagtctgggtatttggaccgtgattgtaaagaagctgttctaaacccgtcggggggcggtgtttgcagggagggaagtagcgtgaggcaggttggggaaggcgtgagaggcctaggagagccgaggggcggtggaggggtgtggcctagaatgttaggcggagcgggaggtgggccgggccttcggacgccctgtcccgcagacgttgacgagtgcagcgaggaggacctttgccagagcggcatctgtaccaacaccgacggctccttcgagtgcatctgtcctccgggacaccgcgctggcccggacctcgcctcctgcctcggtgagaggccccgccccggcctgatccctcctcccttcgactccccgactcgccgattggcctcccacctctgtctttcctcctccgcttctcccctccccttacctctttcccccgcctcctctcctagcctccccaactctcctctaccccaatcttctcctgccctctcctctgcttccccggcctcccccttctgactctcctctcccctctttgtatcccccatcttgcctccctgcttcccacatccgaccacccgacctctctcctcagacgtggacgaatgtcgcgagcgaggcccagccctgtgcgggtcgcagcgctgtgagaactctcccggctcctaccgctgtgtccgggactgcgatcctgggtaccacgcgggccccgagggcacctgtgacggtgagcctgcccccacccgccttcgctagcgcttgcaacgcggtgctggaggctgctcccttggggactgaggaggggcgccctgcttcccagacttaggcggagggaaagaacaccctctcaccgtatctctgtagtggaaataagccgccaccgtgtccatgtattttcttgtgtcaggatcacggccaagcctcccttccagccgcagtccattccccctctgcagctgaagcccggtccacattttaggctatgcccccagtaagacaccgccccaaaactgttaggccccgccccttccaatcggcctctggattaaaaccccctcttcaggccccttctcttcctaacagaagtttggacgtgccctttccgcgccctccaccagtcctacttccagccttccctccaaagaggcccaatcccggtggccctaggccccattctttcccaatgagaaattcccaaggtgaaattctcctagcattggcccccgcccgtttaagctctgcccttccttggtctctctagacagggctttccattcgctcggatggctccagtctctcgaacacttaggccctcccttcctatctttgctccgcccacagacccgccccttgccttttcttactttccaggccttccctcccgccccgctctttcacccctcccgggtcaggctccagcgaggcaggagggtggggctaatcttccatacagtatatatttttttgtgtcggcgggggggggggggcggtgatggtgtgtgagtccgcatcttgtggaacacatgaaacaaaacatctgtgggctgccgttgactctgctagacctctgactcatggaaatctagcttcataagatctcattcattaattccacaagaattcactaagcacctactctatgccagcgtctggaaaaggtaataagagcaacaggaaataagtcatataaaaacccctgccttcctggagttattgtggggtaataaatatgtaaataaattcaagatttatacagcaggccaggagctgtggctcatgcctgtaatcccagcactttgggaggccaaggcggatggatcacgaggtcaggagatcgagactagcctggccaacatggtgaaaccccgtctctactaaaaatacaaaaattagctgggcatggtggcatgcgcctgtagtcccagctactcaggagactgaggcaggatactcgcttgaacccgggaggcggaggtggcagttgagccgagatcgcgccactgcactgcagcctcggcgacagagtgagattgtctcaaaaaaaaaatttatacaacaaaaaactggggggcaccttactatatgttgggcactggagatgtagcaaggaacaaaatagacacaaatccctgctattgtagagtttgtattctagagaggcgacagttggcataccaataaatacatacgtataacatcaggtttaggaaggaaaacaaagcaagacaaatgggacagagatgacagagcagtggatggaggagtgctaggagggcttgacctagacaccagacagaagcgagggaggcagccatgcagagagctgaggggagactgttcctggcagagggaagagccagtgcaaaggctctgaggcaggaccatgcttttgagaaatggcagtgaggacttgagagttatcaactatgctaggtgtggtggcacaagcttgtaatcccagctactcaggaggctaaggtgggagaactgcctgaacccgggaggttgaagctccagtgagccatgatcctgtcactacactccagcctgagcaacagagcaagaccccatttaaaaaaaagaaaaaaaagctggatggggtggctcatgcctataatcccagcactttggaaggctgaggcagctagattgcctgaggtcagaagttcatcaccagcctggccaatatgatgaaaccccatctctactaaagaaaaaaaaaaaagatagtggctgggcgtggtggctcacacctgtaatcctaggacttgaggaggccgaggtggacagatcgcttgaggtcaggagttcgagaccattctggtcaacatggtgaaatctcatctctactaaaaatacaaaaattagctaggcatgatggtgcatgcctgtagtcccagctgctctagaagctgaggtagaattgcttgaacctaggaggcaaaagttgcagtgagctgagattgagccactgcactccagcctgagtgaaagagcgagactccgtctcaaagaaaaaacaaagttttcaacattgttgatcttcagaagctcaggctcctagaataccagattgctaaagacttcttagtcttgggcaccggaagtggtgttagaacttctgaattcaggcctttgactcccctttcatctcctccacactctgcagatgtggatgagtgccaagaatatggtcccgagatttgtggagcccagcgttgtgagaacacccctggctcctaccgctgcacaccagcctgtgaccctggctatcagcccacgccagggggcggatgccagggtgggtgtccatcaggcatcgggtgagatgtggagatggtagaaggtccagaaatggcctgactgtctggtggttgcagatgtggacgaatgccggaaccggtccttctgcggtgcccacgccgtgtgccagaacctgcccggctccttccagtgcctctgtgaccagggttacgagggggcacgggatgggcgtcactgcgtgggtacgggacttcaggaggtggatgggaccaaagggggtgggggaggttggtcaggccctgtccctccccatatatctgaacaaatgggaattttcgggttgtggaatttagactttggaatataagatcatcttcatgccaggcacggtggctcacgcctgtaatcccagtactttgggaggccgaggcgggcagatcacttgaagtcaggagtttgaaaccagcctggtcaacatggtgaaaccccgtctctactaaaaatacaaaaattagccggatctggtggcaaatgcctgtaatcccagctactcaggaagctgaggcacaagaattgcctgaacccaagaggtggaggttgcagtgagccaagattgtgcaattgcactccagcctgggtgacagagtgagaccctgtctcaaaaaaaaaaaaaaaaaaaaaaaaatcagaactgttgtagtggctggtgacagaaacctgacttaatcaggttttatttttgtgtgtgttcttttaaaaatgtataaagtataaatgtataaagtactaatcttaagtgttcataaacattaatctttcctaacattttatgaggaaaatttctaaacacaaagcaaattgagagaatcatagaatgaacacctacctactcatgatctagattatattatcattttattacacttgcttcctcacatatctatccattaatccatctaattttttggacagagttaaaagtaaattgcaggcaccagtctgcttccccataaattcttcaatatgcatatcactaaccagaattcaatatgtgtttaccaatgtattcttctcttctctcttttttttttttactttgaggtggggtcttgctctgttgcccaggctggagtgtggttgtttgatcatagcttactgcagcctctaactcctgggctcaagccatcctccctccagaactgagcttccgagtagctgctaccacaggcacacgcaaccacgcccagctaatgtttttaatttttgtagagatgagttttttttttttttttggagacagagttttgctctagttgtccaggctggagtgcaatggcatgatcttggctcactgcaacctccacctcccgggttcaagcaattctcctgcctcagcctcccaagtagctgagattacaggtgcccaccactatgcccagctaattttttgtactttgagtagagatggagttttgccatgttggccaggctggtcttgaactcctgaccttaggtgatccgcccaccgtggcctcctaaagtgctgggattataagcatgagccaccacgcctggcctgtagagatgagttattgctctgttgcccagactggtctcaaactcctggctttaagcaaccctccctccttggcctcccaaagcactgggattacaggcatgagccattgtaccctacagatattttcattcaacgttcaatttatatacagtgaaatgcagcaatcttaattatacattctgtaaattttcacaaatgcaaacacaacaggttttatttctttaaagggaattaaaactataaagtcttgggatatatttgaactccaggcataactggatccaggaattttaacaaggctatttctatcttctctgagttctgctttcttctattgcatgattttcaggcagattatttttcacaatgatgaaggtggccctagaacctctgggctaacatctccagtgggccacccgagagctaaaaagggaggtttttttttcaatatttctagcaaaagcgccaggcctggctttgattgacccagcatgatcactgcctatgtctgaaccagagaaatgccgtcatctgtttggtcattcctggaacttgtgcccacctctcagagtagatatagccctactcaaagaacaggattgaaaatagaggagcacagggttcccaagggaaattcaaggtttctcactagaagaaaaacagatgatgggatctgggccattaaatatacacattatatttgaaagctgagactttcggacctttggaatcatagaagcttataaccactgagtccctctcccctgttgtctcctgcttacagatgtgaacgagtgtgaaacactacagggtgtatgtggagctgccctgtgtgaaaatgtcgaaggctccttcctctgtgtctgccccaacagcccggaagagtttgaccccatgactggacgctgtgttcccccacgaacttctgctggtgagactgatgtgtctatttaactgatggcggctggccccatgggaaaatcacgtggtctaatcattcctgatgtggacagctaccatcagctaaatactgttgttttaaacatcaacaaaagacacataagttaacatgggtagtgagactgtgtcaggagaattagaccctggtcctgactctaccagattctttcattcaacaaatgttcacagggtgtgcactgtgttcaggccatcttctgggcactgagaacatagtagtgaccagaagggatcactgtctgtcctcaaggggctcacaagccaatggggcagacagagatatcaccagatagtgacaacccagagaaatcaacaagactgtgacggggaaagcccaggggggttttggaggaggcgcctggcccagcatgagaagaggattagggagttcttcctgtaggagacgacatctgaactgagagctgtgggatgaatagaaatgagccaggcccgatgagtgaggagggcattctgggcagaggacacagcaagggcaaaggcctggcaaagccagagagcatctggcatgtgagaagaactgaaacaggttcaacatggcatgatttagagagcaaaggaaggggtagggagagatggggccagggaaagagtcaggtgcccgatcacactgacttatcacagtaagagagcactgcggtaccgtggaaggggtttcggcgttttttttttgaaaattttttttaaatgttttttttttaagacagggtcgtactttcacccaggccggagtgcagtggcgtgatctcagctcactgcaacctccacctcctgtgctcaaggaatcctccaacctcagcctgctgagtaactgggactacaggcacatatcaccacaacagctaatttttgtattttttgtagagatgtggttttgtcatgttgcccaggctgcagtatttttttttttttaatttttaaatgttacatatttaggctaggattggtggctgaaggccataatcccagctctctgggaggccaaggcgggaggatcacctgaggtcaggagttcgagaccagcatggccaacatggcaaaaccctgtctctactaaaaatacaaaaattagctgggtgtagtggtgcacgcctgtaatcccagctattcgaaaggctgaggcaggaaaatcgcttgaatccaggaggcggaggttgtgggattgcaccactgcactccagcctgggtgagagaggaagactccgtcccaaaaaaaaaaaaaaaaaaaaagctatgtatttatttatttttaataatttccatctttactttagattcaggggatacatgtgcaggctttttacctgggtatatttcgtgatgctgagctttgggatacaaatgatcccgtcacccagatagtaagcacagtacccaacagccagtttttttttttctttgagacggagttttgctcttgttgcccaggctagagtgcagtggcgtgatctcagctcactgtaacctccacctccctggttcaagtgattctcctgcctcagcctcctgagtagctgggattacaggtgtccgccaccacgcccagctaattttttgtatttttagtacagacggggtttcatcatattggtcaggctggtctcgaactcctgacctcaggtcatccacctgcctcggcttcccaaagtgcagggattacaggcgtgagccaccatgctcggcccaacagccagtttttcaacccttgtacctctgtccctcccccatctagtggtccccagcaactattgtgggcatctttacatccatgagtacccactgtttagctctcacttgtaagtgagaacatgtggtatttggtcttctgtttctgcattaatttgcttaggataatggcctccagctgcatccatgttgctgctaaggacatgatttcattctttttcatggctgtgtagtattcatggaagggttctaagcaggaaagatagaatcagattttgaaacctccctctggccgccatgtgaaggtgattgaagcgggtgatatggaggctgggagctcagggaacaggctggggcaggggcctggacaggagagaacagggctggaccaaggcaggggctgtggaaggggaggagaaggtggtgggagaaaaacccaagaggccatgtggacaagctgtggatgtctgggtggggaagctgtgtccaagacaaggcataggttttttgtttgtttgttttgtgacagagtctcgctctgtcgcccaggctagaatgcagtggtgtgatctcggctcactgcaacttccgctcccgggttcaagcgattctcctgcctcagcctcccaagtagctgggattacaggcatgcgccaccacacccggctaattttttctatttttagtagagaccgggtttcaccatgttggtcaggctggtctcgaactcctgacctcaagtaatccaaccgcgtcggcctcctgaagtgctgggaggacaggcaggagccactgcacctggcgacaaattgtaggttttgagatgaagactcagccagtttgccacacactggataagagacccagagaggcatccaggaagccagggaagttccctcaccacccacccaagctgttagctgcagtgacgggaaagtgtgaggtggggaggcaagagatgcagaaatgacaggaggtgacagtgggagaaagagaaacagtgacagaggagcgtgagaggtgtggagtctggttctgccactgatggctgccaccctctgtttccctatctatgccagcctcagtttccccatctatgatagtggcggggctggggattcagcccacactgggctaaagctccttgtctccccaggcacgttcccaggctcgcagccccaggcacctgctagccccgttctgcccgccaggccacctccgccacccctgccccgccgacccagcacacctaggcagggccctgtggggagtgggcgccgggagtgctactttgacacagcggccccggatgcatgtgacaacatcctggctcggaatgtgacatggcaggagtgctgctgtactgtgggtgagggctggggcagcggctgccgcatccagcagtgcccgggcaccgagacaggtgggcatgggctgatggggacacagggctgagggcttgggtggaaatactgggtggggtgtgggcctgggacaggggacacttttggacagggccttgaggtactagtactgtcagggcaagggcgagctgccaggcaggtgggcatgggcagacataaggctgagaggtgggcactaacaggcacagggccagagggacttttgtgacaagtgggcacgagcaggtcagggctggggctggggctctggtgtcctggctcaggcttgtctctgtgtgtagctgagtaccagtcattgtgccctcacggccggggctacctggcgcccagtggagacctgagcctccggagaggtgaggccagcctttgaccctccaccccactcagctctgaggcccagcttcgtctcttcctgttttctttgcctctgtctctcaccctttctgtttctctgtatctgtctccccgaccccacccatactctgtctctttctttcttttctttcttttttttttttttcttaagatagagttttgttcttgtcgcccaggctggagagcaatggcgagatcttggctcactgcaacctttgtctcctgggttcaagcgattctcttgcctcagcctctggcgtagctggctacagacactagccactacgcctggctaatttttttgtatttttagtagagacagggtttcaccatgttggccagattggtctcgaactcctgacctcaagtgatccgcccaccttagcctcctgaagtgctgggatttcaggcatgagccaccgctcctggcctctccatctttctttccctgtctctacttcttggtctatcaccagctctgtctctgtcttcccacgtcatgccctcacacactccacccatccagcccgcccccatctctctctctgcttttcgcacagacgtggacgaatgtcagctcttccgagaccaggtgtgcaagagtggcgtgtgtgtgaacacggccccgggctactcatgctattgcagcaacggctactactaccacacacagcggctggagtgcatcggtacaagccccacctcccccaacccccggcaactctctccaacccctagccttgccagctcccctctggaatgtggccaccaccagcgggaagtctttcctggagtctagactccatccatcacactgccaatgtgctgggaagagaaatgggaaagggtggggagagttgaaggggatgcctcttaatcatcctctccctagacaatgacgagtgcgccgatgaggaaccggcctgtgagggcggccgctgtgtcaacactgtgggctcttatcactgtacctgcgagcccccactggtgctggatggctcgcagcgccgctgcgtctccaacgagagccagagcctcggtaaccccgcccacgccatccaggccctccttcccttggctcggcctcacacccgcacccgggccacacctttgcgacggccacgccctccgaaggccacgccccatgctcctggctcgaccacgccccactgagccctcactcagtctctgtcccactgtctgtctctctgaggcgagctggctaggtggttaaaggcaaaagttttagggcaacctttgcatgttgcctcttggactccaggtttctttctgcacactgggtgaatagcccctaccttatagggtggctgtgaggaattttatttaattttatttatttattttttgagacggagtttcgctcttgttgcccaggctagagcgcagtggcgccatctcagctcactgcaacctccacctccggggttcaaacgattctcctgcctcaggctcccgagtagctgggattacaggcatgtgctaccacgcccagctaattttgtatttttttctttagtagagacagggtttctccatgttggtcaggctggtctcgaactcccgacctcaggtgatccgcctgccttggcctcccaaagtgctaggattacaggtgtgagccaccacacctggctgatgaattttattttattttattttatttttaatttttaatttttagttttattatttattttttactaagtaccacatgagtgctgcctgttattatttatctgcatctctaggtctctgtctctttccagctgtttgtggatttctgtctttggggttttctctgaatttctgacaccctctggatctttgttttcaggtccctttctcctgcctctgtatctttgttttcctgttttgagtctttgactctttggatgtgtttctctctctctctttgggtcttttttctcccttttcgtttctgactattttcctatctctaggcccctaacaacttctgctgaagctctgtctcttgaacactctacttgtcgttgtttgttttcatttttgagacaagatctcgctctgtcatccaagctgaagtacagtggcacaatcacagctcactgcagcttccacctctcatgcccaaatgatcctcccacctcagacttgcagtagctgggagtccaggagcccgccaccaagcctggctaatttttgtatttatatatatatatatatatatatatatatatatatatatatatatatatatatatatatatatatttttttttttaaagatgggtttttgccatgttgcccaggctggtcttgaactcatgggctcaagcaacccccccacctcagcctcccaaagtgctgggattacaggctccaacacactctctctgtgcttcttgccacctctctttttgcccactgtcccaaccactcttctctcatttcctgtgccttcagcacttacccccatacagtgagatgtcagacaatgctcagagaagcaaagcaactgccccgaggccacacagccctccagaggccagacttgggtagacccctctcaggccctacctcccagtcattggacaccttcttctgccctctcctcctatatgacagtctccttgttcctcaatccagaaccctggagtgacctcagagaacttccagagttagatcacagctgatgagaaggatttgctgataggcagagggtgcctgggctgctcagcaggggaagggtccagcccctgggaggacctgagtgccaggcccactctgacacatgctgtctccacctacagatgacaatctgggagtgtgctggcaggaagtgggggctgacctcgtgtgcagccaccctcggctggaccgtcaggccacctacacagagtgctgctgcctgtatggagaggcctggggcatggactgcgccctctgccctgcgcaggactcaggtgctggcactggcctaggctgaactcagaggccttgccccatgggctccaaatctaggccctcagatccccagtcgcagaacccccagactctatccaaactctgtcccctagaccaacccctatgtcgcagcccatcccaaaatcttggtccccgattcacactccaaagacttccaagtctcagccacagacatcccaaggcctgacccagcagatcccatagtaccagacccacaggcccctgaggtctggtctctcatatgctcagctcctggtctctagaaccaccagacacagcctatgagatgtcctcccctaaatcctgggcccttagacctgaaatgccagttgctcagacctcaccatcctggccccagaccccctggtcacagccccacagacctccaagtcccattgccttagacaccctccaagtcccattgccttacacaccacatccgggtgcctaagaccccaacacacagccccagagattcccaagtcttggtttctacaacctctgagtccctcagtcctcagcccttaggaacccagttccaaagccccagtcctgggtcctcagacctccaggtcccagtgcctcagactgtctcccatgcatcctgccccctcaggtccccagcagcaatccctgggattccccagtcctggtccacagaacacccccatctaatttcttcaggtccctagtcctagctcccatgggtcgctccaattccagcctctcagaccctgattcttagcaggcttcattacccttgatctcagcacgtccgaatcccagtctcagccttcagattctcagcgctggctccagaaaccccggggccacccaggaccctccccatccagtcctctgcctcctctcccaaggggggtatgtgagtggtgggtgtgggggccagcaggggctgattgtttgccttggctcctgttcccagatgacttcgaggccctgtgcaatgtgctacgcccccccgcatatagccccccgcgaccaggtggctttggactcccctacgagtacggcccagacttaggtccaccttaccagggcctcccatatgggcctgagttgtacccaccacctgcgctaccctacgacccctacccaccgccacctgggcccttcgcccgccgggaggctccttatggggcaccccgcttcgacatgccagactttgaggacgatggtggcccctatggcgaatctgaggctcctgcgccacctggcccgggcacccgctggccctatcggtcccgggacacccgccgctccttcccagagcccgaggagcctcctgaaggtggaagctatgctggtgagcactgccagcgcatgatgagactgagatgaggggtgaggtgtgcacggagagaggagggagggaaacagaaggcgggaggagagacggaacacaggtgcaactggagagagccacagaaagggacagagaagtgtctatagcccggcaaagaaagagaaggtggcagagggaaagctggcgagagaatgaggtaagcttactggccccgcagcacccgccacagccctggagcgggatggacagtttacagcgagaaagatggagccaaggacgcgcacccaccgttgtgggtaaggggtgaaggcagggacctcaagtcatagggtccccgcatttcccacaggttccctggctgagccctacgaggagctggaggcggaggagtgcgggatcctggacggctgcaccaacggccgctgcgtgcgcgtccccgaaggcttcacctgccgttgcttcgacggctaccgcctggacatgacccgcatggcctgcgttggtgagggcgggcccggggccagcatgcgcagggagaggcgaggcttgtccagggagggtggaagccctgactagggggtgctggtcagggacgggaaaggacctcactacaggggacgggccagcgcaaaagggaggagtaattcttccacctgggtggggcttgactgaagaaggcggagtcagggtgccagcagggcagggcttaaccacggggctggagccgggccttgaagcaggatagaggaatagaatagtgctggtgtgacttgcagtgctaccttgggcagtctgcaggacctctttggagagcctcagtcttcccacctgtaaaatgggaatattaatcaagtctgcctaatttggatggcagtaaagccaagtgattaaaatcaagaacatagccgggcgcagtggctcacgcctgtaatcccagcactttgggaggccgaggcgggcggatcattaggtcaggagtttgagaccagcctggccaatatggtgaaaccccgtctctaaaaatacaaaattagccgggtgtggtggtgcatgcgtgtaatcccagctactcgggaggaacccaggaggcagaggttgtggtgagccaagatcgcgccattgcactccagcctgggcaataagagcaaaactccgtctcaaaaaacaaacaaaactcgaggaggtcacatagacctcagactcagtccagcaacttgctgtgtgacgctggacaggtcactgtcccttacctaatttttctgatatgaaaaatggctacagtcaaagatcccatttcatagaattgcgaatattattaacactgatttacaataacattgagagtcatgtgcaaatggaggcacatgcgtaaaacgaattacagtacctacctaataggggtattagaaggacaaagttaatacttgtaatgtgcttaaaacaatgcatgaacatttattgttgttgacaccatcatcagtatttttttcttcttttttttttcttttcttggcgacagagactcactctgtcgcccaggctggagtgcagtggcctgatctcggctcacagcaacctcctcctcccaggttcaagcgattctcctgcctcagcctctcgagtagctgggattacaggcgcccgccaccatgcctggctaatttttgtattcttagtagagacggggtctcaccatgttggccaggttcgtctcgaactccggcctcaagtgatccacccgcctcagcctcccaaagtgctgagattacaggcatgagccaccgcgcccggccattattattttcttaacaaaatcctagtgcggtatgggccaccatatccatcttacagaacacgaaactgaagcacagtgaggttaagccacctggccgggctcacacagttagcagatggcagaggccagattggactccaaactgctcagcatctgtgctcctctgttccaagaacttaaggggccaaggaggcgagcttctggggccccagccttcagcagcgatcgttgtctcccctccgcagacatcaacgagtgtgatgaggccgaggctgcctccccgctgtgcgtcaacgcgcgttgcctcaacacggatggctccttccgctgcatctgccgcccgggattcgcacccacgcaccagccgcaccactgtgcgcccgcacggccccgggcctgagccctggcacccgctggccgcccacccgcgcccgccactcggggcccctgccgcgcatcctgcagcccgcttatgcgtatgtgcacggggccgcccgcctggacctggagaagggacctacggacgcctggaagctgcgacgccctgcactgctcccgcctccaccagcgcctcccactgatgtcgtggtcccgggcctggcccaggggcccctttacatgccctctcccttttataaaattttccattaaaaaccacctattttctatcttttgcctcctcctgtctatttctccaagtctaccccagtttgtgctttgagtcactaaatgacattcccttcccttctgacccctagtttcgtctgtctctctgcctctcttggtctctgtcttccttctctctctgtctctgtcgttctatctcatctctgtctctttctgatttgttttctctgcctaacctctacatcctgtcttttcatttctgtttctgcatgcgtctttctcttttcccttctctttgtttggttctttcatctcgagagcaatcttgcctctggattttttttttttttttttttttttttttgagatggagtctcactctgtcacccaggctggagtgcactggcgccatctccatccactgcaacctctgcctcccggtttcaagcgattctcctgccttagcctcccaaggagccgggattacaggtgcacactacaacccaggctaatttttgtatttttagtagagacggagtttcgccatgttggccaggctggtctcaaactcctggcttcaggtgatccacccaccttggcctcccaaagtgctgggattacaggtgtgagccaccgcacccagcttttattttttagagatgaggtctccctatgttgcccagtctggtctcaaattcctgggctcaagtgatcctcccacctcggcctcccaaagtgctgagattatagatgtgagccaccgtgcttggcctagaagtcttaagctgtcctggaacaagtggggcaagagcagggagcaggagtccctggagggccaaacccagacctgacgctccagctaggagttggctgtggatggagtatggagcggcagtcctgacagctggaggcgggaatgagctctgtgtgtgatggtggagtgcccagcacggacctcctccatgtgccctgcctgcttactggccatgttcctagtccagactcctcctccctaaaaaacaagaacggcctagatcagcataaacttagggcaggagtaggggtcgggaatcgtgggtgatcaacttggcactgggccaagctgggaaaaaaaaaaaaaatgtacctcagccaggcgcgatggctcacacatgtaatcccagcgctttgggaggcccaggcaggcggatcacgaggtcaagagatcaagaccatcctggccaacatggtgaaacctggtctcaactaaaaatataaaaattagcccgccatggtggcatgcaactgtaatcccagctatttaggaggcggagataggagaatcacttaaacccaggaggcagaggttgcagtgagccgagatgacgccactgcactccagtctggcgacagagccagactgcatctcaaaaacaaaaacccacaaaactgtacctgtcattcttcacccacctgtcaattcttgtgtccccagggtttcaaactcatatgctgcaaagaccagaaccggaatgttagcaggaagcagggaaaattgaggcacacattaccttctgcctaaggcttggttagactaggaaggggaattttccccattgttaatacttttttttggcctggcggggtggctcacgattgtaatcccagcacttcgggaggccaaggcaggatgatcacttgagctcgggagtttgagaccagcctggcaacatagtgagaccccatctctacaaaaaagtagctgggtgcgatggtacatgcctgtagtcccaactacttgggaggctgaggtgggatgattgcttgagcccaggaggtcgagactgcagtgagctgtgatcgtgcctctgcattccagcctgggtgacaaaggcataccttgtctccaaaaaagttttttttaatgtatatttttaataactatctgatattgtttggctgtgtccccacccaaatctcatctcaaattgtaatcagaattgtaatccggggaaggacctggtgggaggtgattggatcatggggacagtttcccccatgctgttatcgtgatagtgagtgagttctcacaagatctgatggttttataaggggctcttctcccttggctcgctgtctctcctgccgccttgtgaagaaggtgactgcttcccctttgccttctgccatgattgtaagtttctgaggcctccctagccatgcagaactgtgaatcaagtaaacctctttcctttataaattacccagtcttgggtggtatctttatggcagagtaagaatggaccaatagggccgggcacggtggctcatgcctgcaatcccagcactttgggaggctgaaacaggtggatcacctgaggtctggagttcaagagcagcctggccaacatggtgaaaccccatctctactaaaaatacaaaaattagcagagcatggtggtggatgcctgtaatactacctactcgggaggctgaggcaggagaatcgcttgaacccaggagccggaggttgcagtgagctgagattgggccactgcactccagcctgggtgacagagcaagactctgtctcaaaaaaaccaaaaacaaacagaaaaagactaatatagtaccctatggggcctatttggcctatgaggctccagttttaatcctctaggcactgctgaaattgcataaattgtggattggaggctgcttcctgacctgatctccagcccacccgctgagtgtcaggaggggtcacatgcccagcagcctcctgtgctacatcggggaatcatactaagagcgcctaccctgcaggattggtggtggtggttaaatgaattgtcatatatgtgcttagaatgtcacctggtacagagcaagggctcagtcattgttggcataaccctgggcctcccaggatatgctgagccctgtggctgggcagatagtaaggtcttgttcttttctcttttcctttccttcttccttttcttttctttctttctttctttcttttttttttttgacatagggtcttgctctgttgcccaggttggagtgcagtggtgccaccatggctcactgcagcctcaacctcccaggctcaagtgatcctcccacctcagcctctcaattagctggaactgcaggcatgtgccaccatgctcagctaattttttaatttttattttttgtagagaggggaccttactgtgttgcacaagctgatctcaaactcctgggctaaagtgattctcctgcactttggcctgccaaagtgctgggattacatgtatgacccacggcacctggcctggctaggtctttttctttaccaattctccctcccagggtggaggaggaggccagaccccatccccttcaacaggacagtgagaaacacctaacacaaggccttggtggggaggagtgtcagacaaggagtggctcaaggctccacaaaggggtgacagttgcacaaaactgtctgtaccaaaaatcattgaattatacactacacatgggtgacttgtgtggtatgtgaatcataagtcaataaagcccttctttaaaaacgccgactctacaaagcgtttcagaaagttaccctccagctgatacagggaacccgacccaaccactaattcctcagtcattcattcaacaaatattttcctgctttgcaataagtgaattcgaggaacacaaactttaacccagccttggggggtggttagggagggctcctggaggaggagatgttggagctgagagttgattactgtagggaaatgagcaagatgaaaggggtggaggtgcctataatcccagctactccggaggctgaggcaggagaatctcttgaacccgggaggcagaggttgcagtgagccaggattgcaccgctgcactccagcctgggcaacagagtgagactctgtcagaaagaaagagagagagagagaggaaggaaggaaggaaagaaggaaggaaaagaaagaaagaaagaaagaaagaaagaaagaaagaaagaaagaaagaaagaaagagaaagaaagaaagaaagagagagaaaaagaaaagagaaagaggtggagaaccatgttccaggtggaggggacagcacttccgaaggcctagaagtaagagagcaagtgtctgttagatgtctttcctttggtatctaaggcctgtattggacaacaatggtgacaatcttggtgcctgagaaatcccaggcccttgccttcatgggggacaccgacacatcaccacacatgagagcctgtgctgtatgggggaggcacaggcaggggtcaggctgcggtgggggaagatcagagggcatgcatgcccagaggagacacttgatccagtctgagagatgatcagggaaggctttctggagaaagagacaaagctctgaacagtctctgtttgggcgtctagatccctttgagaatctgtcgaaagctcattcacagaagaaaaactcacacaaacaaaggttgcaggcaatttccaagtattctcatccttcctcggaatcttctgtgggtatcccattcccaccccgcccccacaaccaccttgctgcataaatgtcccaggaattgcgacagggctggccaacagtgctggaaaactgcaatcgaatttcagcatcctgggagtgggatctttcttctgagatctcgcccgccgccgggcctggagggtgtgccccatggatctaattgttatcctgcctgcatcccctgcactaacccccagacctggcgttggggcttctggcactggccgggaccgacgcgttctcctctggaatgttcagagggaggtagtccaggcggtcaccgcgctcgccagacaagcaacgcagcgccccccgatggccaccgcgcgccggcgcagcccaagccggctgcgccccctagtggccgatgctcgtaaagtcttcagcgagccccgagcttttgctagccagcccttggttttgcaggctggggtcatcgtcgttgtcatcgttggcatcatcatcatcatcatcatcatcatcatcatcatcaatagctagtaggcttggcgtggtggcccacacctgtaatcctagcactttgggaggccgaggcaggtggatcacttgaggccagaagttcgagaccagcctggccaacatggtgaaaccccgtctctacaaaacagtacaaaaaagcaaccgggtgtggtggtgggcacctgtaatcccagctactcgggaggctgaggcatgagaatagcttgaacctggaaggcggaggttacagtgaactgagatcgaaccactgcactccagcctgggcaacagagtgagactctgtctcaaaaaaaaaaaaaaaaaaaaagctatgatcatccaggcagtgattcatgcctgtaaccgcagggctttgggaggccaaggcaggaggatgtcatgaggccatgagttctagactaacctgggcgacagagcaagagctgtctctataaaacaaaacaaaatgctatagaccagacgcagtagctcacacctataatcccagtgctttgggaggccaaggcaggcggatcacctgaggtcaggagttcgagaccagcctggccaacatggtgaaaccccatctctacactttgaaaaccactactttaactgtctctcccacagggagagctgcctccttcactctcagctcatttggttcacatgttgaccctactggaagactccagacctggccagtgagagaatcccttcccttcagcctttgcaactggcttagggacaggtgtgtccctgaagctggactgatgagcattggctctggaactactgctgattgttgaagaaggggcttcctagacatactgtgctgaaagggcacaggcttggaacactgggttcttacatgggagaagagctggcctgaaaatgcagccaacacgaggggaagcagcgctgggagaggaacagagagactggtgcctggcgcacgtcatctgcacctctgtctcacccttctccagaacatttctttgcatcttacatcaaatttgtcagcaaattctgtcggctctagttagaaaaggtgtcccattctgtgttggaggaaaagcgatgctgtctatcaggacgttaccgggtcagttgacagaactggaatacgaacagtcgattagaaaaattcacatactaatattaaatttactgaagttgatcactatattgtggtcatgtaagagaatatccctattcttttgttttgctttgttctgtttttgagacggagtctcgctctgttgcccaggctggagtgcagtggtgcaatctcagctcctgcaacctcctcctcctgggttcaagcaattctcctgcctcagcctcccgagtagctgggactacaggtgtgtgccaccatgcccagctaattttcgtattaatatttccagtacagacggggtttcaccatgttggccagggttctcgaacttacggcctcaagtgatctgcccacctttgcttcccaaagtgctgggaccacaggtgtaagccacgtcgcctggccagaaatatccctattcttttcttttcttttcttttttgagatggagttttgctcttgttgcccaggctggagtgcaatggcgaaatctcggctcactgaagcctctgcctctggggttcgagaaattctcctgccttagcctcctgagtagctgggattacaggcacccaccaccacacccagctaattttttgtatttttagtagagacagagttttgccatgttagccaggctggtcttgaacttctgacctcaggtgatccgcccccctcggcctcccaaagtgttgggattacaggcatgagccaccgctcccggccaaatatcccaattcttaagaaatacatagggcggctgagcacattacctcatgcttgtaatctcagcactttgggacactgaggtgggacgatcccttgagcccaagagttcaagaccaacctgggcaacatggcaagaacccatctctcaaaaactttaaaaatgatccaggtgtggtggctgcagtgtcaaggctgcagtgagccaggatcatgccactgcactccagcctgggtgacagagtgagaccctgtctctacggaaaaaaagaaagaaaagaaaaagagatacattacagaagtttttgtttgtttgtttgtttgtttgtttgagacagtcttgctctgtcgcccaggctggagtgcagagtgcagttcagttcactgaaatcctggttcactgcaacctcacctcccgggttcaagtgattctcctgcctcagcctcctgagtagccaggactacaggtgtgtgccaccacacccaggtaatttttgtatttttagtagagacaaggtttcttcatcttggctgggctggtctcgaacttctgacctcagatgattcgcctgccttggccttccgaagttctgagattataggcatgagccaccgtgcccagcccattatagaagcttttaggggtgatgttgtttgtaacttagcctcaaagatttttttaaaaatcagaaaaagaaaatacataacagagaagagagcaagtgataaaggaaatgaggtagaaatgttaccaatccatgaacctgagtataaaatacaagagagttctttgtcctattatttgtcttgcaactttttggtaaatttgaaattatttccaaaggaaaagttaaaacactttctaaaattgagagatctaaaatcttaggccaggcgtggtggctcacacctgtaatcccagcactttgggaggctgaggcaggtggatcacatgaggtcaggagttggagaccagcccggccaatatggtgaaaacctgtctctgctaaaaatacaaaaatcagctgggcatggtgggaggtgcttgtaatctcagctactcaggcacgagaatcgcttgaacctggggagcggaggttgcagtgagccgagatggcgccactgcactccaccctgggtaacagagcaagactccaactcaaaaataatatgaaataaaataaaatcttagacaacactatcattataagtaggattggggagatcaaaaacaacatgctctgtgctccaggtactgtttggtgtgatgttgaaaatattagattttaaacttgattttttcttttttttttttttgaggcagagtgttgctctgtcgcccaggctggagtgcagtggcgtcatctcggctcactgtaacctccgcctcctaggttcaagcgactcttctgcctcagcctcctgagtagctgggactacaggtgtgcgccaccacacctggctaatttttgtatttttagtagagacggggtttcaccatattggccaggctgatctcgaactcctgacctcatgatctgccctcctcggcctcccaaagtgctgagataacaggcgtgagccactgcgcctagcctagacttgattttttaaatttctgtcctccaatagaaatagacctgatttttaaaaatgtgcatggccaggcacagtaattcatgcctataatcctaggactttgggaggccaatgtgggaggatcacttgagcccaggagttggagatcaacctggacaacatagctagaccctgtctctacaaaaataaaaatattaggtgggtgtggtcttgtacacctgtagtgccagctacacagggggttgaggagggaggatccattgagaccaggagttccagcctgcaacgagctaggatctcaccactgcactgcaggctgggcaacagagcaagaccctgcctcaaaaaaaaaaaaaaaaaaaaaagcatgttaaaatttcaaagattgctacaaaaagaaagaaatggtgcatagattccaaactagtagagggaaaacaaagaataagaaaacataagacaaaactaaacaaaaaatgcagccaattcaaagaagcttaaatgagcatgaaaaaataaataaacgtagaaaaatgaggacactagaatcacaaagcaaaatggtagaagtaaataaaatacatcattaatcacatacacaaaaaatgtattcagggccaggtatggtggctcacacctgtaatcccagcactttgtgaggctggggcagacggatcacttgaggcaacaagtttgagactagcctggccaacatggtgaaaccccatctctaccaaaaatacaaaaaaaaaaaaaaaaaaaaagaagaagaagttatccaggcattgtggtgcacgcctgtaatcccagctacttgggaggctgaggtaggagaattgcttgaatccaggaagtggaggttgcagtgagctcagattgcaccactgcactccagcctgggtgacagagtgagactccctctcaaaaacaaacaaagaaaaaatgtattcagaggccaaatacttcttaccacctccatagctgccacccatatcttaccctcctcctagggtttggagttcctactcctggccccacaatctctccccgtcatgcagatagagggactctgggaataaccaagtcaactcaactccctctgctgctcaaaactttcctgtggctccatctcactcaaagattattttgctcattttttttttgtttttttttgagacagggtctcactctgttgcccaggctggagtgcagtggtgcaagtcatgactcactgcagcctagacttcctcggctcaagccatcctccaggcctccagggctaccacaacccagccaattttttgatagagacgaggcctcccttattgcccaagctggtcttgaacttatgggctcaacttatctacccacctcggcctcccaaaatgctgggattccaggcctgagccactgtgttccgccaatctcattcaaagtaagagccaaagtcctcactgtggtccagcagactctgcaccgtctgcttcttgttccctctctgacctcacctcccctccaccccccacacgctcctctgcagcaacacggatctccttgttgtttctctaagatccagacatgttcccatcccaccccaggaccttggcactggctgttccctctgcctaggggactctttccactaggttcagtttctctttttttttttttttgagacggagttttttcactcttgttgcccagactggagtgcagtggcacgatctcggctcacagcaagctcctcctctcaggttcaggcaattctcctgcctcagcctcccgagtagctgggactacaggcacccgccaccacccccagctaatttttgtattattagtagagacggggtttcaccatgtggccaggctggtctcgaactgctgatctcaagtgatccatctacctcagtctcccaaagtgctgggattacaggtgtgagccaccgcgcctggcccccttggctcagtccctcaccaccagcagaagaatggataaactgatcccacagtggcctgcaatgtgtgtgtgctgcaatgagaataacctgtaactgcacacgacaaccaggatgaatttttttcacggtgctgactgaaaaaagccagatgctaaaaagaacatattttcagattgcatttacatgaattcaaaacaggcacaaccaatctatgctgtcagaagtgagggtgataatgaccttggagggagggcaggtgataagggagcgccgagggggcttctggggggctggagatattgcttcttgggctggtggctggtgacacaggtgtgttcaatcggtgataattcctccagcggttacacttacggtttgtactttcctgaatatgggtctacttcaagaaaccactgctgaaaacgaggagctgcacccaccacccagtgtcccctccatccagtttaagcaacaggacattctcagccccccggggtccctccctcccaatgcaatgtgcttttatgtcttcaaggggcctggccaccaccttggttgcttcccccagcttgctatgcatgtcaccccacgcatgttccaggcagctccacagaggtccccagagagaaggcaggctgtgggtgggaggaagggcaggggtgggggacgtggcttcccagcggagcccgggcagggggaggaaacatttctgcaacaccccacaccaagtcctgacttcgggggggctttgcagggtgaattctaagtgcccagggccccatgtgaaggggtcaactgtgtctcactctgtgtctgtctctctgtctgtctctcttcctgtttcctccctccctcccagtctctctctcctcaagaagaaaaaaactcacaactatttacataacaattttatatcagactgtaacccaaaaacccaagttccaacttcgaatttttcaataaactttgaataaatagtagtgctatttttctttctttttttttttagtactgtaatgtttacttttaaatttaatttttactggcagactttacgtatatgaggttcaagaaaagaaaatctccactgtttacatttcttttctgactattaatattgttcatttcatttcctgattattactggcaataattttgtcctatggggaagggaggcgcttggcaggcctcgagttatcctttgagacatgggggtctgtggtcagatttagaaagtgcttgtgggtggctgggtgggagtgggtcatgggagacataagggcaggctggagtccagggaggaggccggccgggcagggacccaggcagcggagatggacagggccatggagaatctgggaggcgcaggccctggggactgtggattggggaaggagataattttattttattatatttttttgagacagagtttcagtctgtctccaagactgtagtgcaatggcacgatctctgctcactgcaacctctgcctcccgagttcaagggattttcctgcctcagcctcccaagtagctgggattacaggcacgcaccctcacacccagctaatttttaatatttttggtagagacggggtttcaccatattggccaggctggtctcatactcctgacctcaagcgatccacctgccccggcctcccaaagtgctgggattacaggcatgagccacgacgtctggcctaattttttgtatttttaggagagacagggttttgccatgttggccaggctagtcttgaactcctggcctcaagtgatccgcacacctcaacctcccaaagtgctgggattacaggtgtgagccactacgccccgccaagggaaggggagaatttgagtgctattgaaggtagaaaacacagaacataggctgggtgtggtggctcatatctctaatcccagcactttgggaggccaaagtgggaggctggcttaatcccaggagttcgagatcagcctgggcaacatagtgagacccctgtctctacaaaaaattaaaaattagccaggcatggtggcacccacctgtactcccaaggctacttaggaggctgaggtgggaggatcgctggatcccaggagatctgaggtgagccgtgatcatgccactgcactccagcctgggcagcagagtaagaccctgtctccaaaaataaaaaataatttaaaataaagcgcggaacactgtcaggttgtctgtgggggagcagcgggcaggcgaccaggagggctggctgctctgtgcagggctagtgcctgggttgggatgactcggcctcagagctgtaaataaagaaggaagagggccgggcgcggtggttcacgcctgtaatcccagcactttgggagggcgaggtggactaatcacctgaggtcgggagttcgagacaagtctgaccaacatagagaaatcccatctctgctaaaaatacaaaattagccgggtgtggtggcacatgcctgtaatcccagctactcgggaggctgaggcaggagaatcgcttgaacccgggaggcagagatcacagtaagccgagatcacaacactgcactctagcctgggcagcaagaacaaaactccatctcgaaaaaaaaaaaaaaaaagtagaagaaagaaagagctgccacagttgagagcttcctggatgcctttgttaactcttggggttttcacatacccatcttacagatggggaagctgaggctcagagagaggaaggcccaagtggaagagcaagcctggagcccaggtctcctcctgcctaatcctgggcttttgctggtggactcccgcccaatcttgaataacttcaggccttaaacaacctcccacgattgcttttcctcccattagaacaataaatgcagatacaaaaaccaactatgcttgtctacaaagcccaagagaatttttgaagtaataaaactgtcatgaatgcagactgtggtgattacatgacttacgaatttttcaaaactcagaatcgagccagatgaaatgatcctgcctgcaatcccagcactttgggaggctatggcaggaggatcatttgaggccaggagttcaagaccagcctggccaacatggtgaaaccccgtctctactaaaaatacaaaaattagctgggtgtggaggcacatgcctgtaatcccagctatttcagcagctaaggcaagaaaattgtttgaacccggaggctgaggttgcagtgagaaatgatcgtgccactgcactgtagaccctgtctcaaaaaccaaaaccaaaaccaaaaaaagaaaaaaaaacccttaagaatcaggattatacacgagcacacgcacactcacccataaattttaccatttgtagaaaagaagaagaaaattcaaaaccaaatacaatgaatgtactttctctggattccaattcacaccaaacaactgtaaaaatctgtttttgagacaattggggaacacaaactggcttttaggagatattaaggaatttcggttaattatgctagacttgataatgccattgtggttgggtaatgcccacataccatgccttggctgggcgtggtgactcacacctgtagtcccagcattttgggaggcccagatgggaggattgcttgagctcaagagttcgagaccaacctaagcaacatagtgagacctcatctctacacaaaattttaaaaaacattagccgagtgtggtggggtgcgcctgtaatctcagctactcaggaggctgaggtgggaggagtacttaaacccaggagtttgaggttgcagtgagctgagattgtgtcactgcactccagcctgagcgacagagcaagaccgtcaaaaaaataaagaaagaaaagaaaatgtaccctattcttctcttcaaggtgctcattgaagtatttacaaatgaaacaacataatacctctcacctgtaattttttaaaatttttatttattaattttttagagatggggtctcattctgttgctcaggctggagtgcagtggcatgatcacagctcactgtaacctcaaacttctaggctcaagtgatccgcccgcctcagtctcccaaatagctgagattacaagcactggccaccatgctttgctaatgttttaaaaattatttttgtagacacaagactatattgcccaggctggtctcagactcctggcctcaagtgatcctcccaacttggcctcccaaagtcctggaattacaggcctgagtcaccgtgcctggccaatttttttttttttttgaggtggagtctcgctctgtcgcctaggctggagtgctgtggcctgatctcggctcactgcaagctccgcctcctgggttcacgtcattctcctgcctcagcctcccgagtagctgagactacaggcccccaccacgcctggctaattttttgtatttttagtagagacggggtttcaccatgttagccgggatggtctcgatctcctgaccttgtgatctgcctgcctcggcctcccaaagtgctgggattacagacgtgagccactgcgtcctgccctgcctggcctattttttatttttatgttttttacagacagggcctcactatgctgcccggactcgtctcaaactctgggctcaagcgatccttctgcctcagcctcctgagtagctgggactacagggtgtgattttttttcaagtattcaaaaaaatggggaggggaaagaagatgaaatggcaaaatattgatggttcttgaacctgggtgatgagtatatgtaagcttattgtctcttgactttttgtgtctgtttgaaaattttcatgatataagagtttaaaaactgaaaataaaatttattgaaggagagtttgggccgggtgcaatggctcgcgtttataatcccagcactttgggaggccaaggcaggtggatcacctgaggtcagaagttcaagatcagcctggccgacatgacaaaacactgtctctaccaaaaatacaagaatcaggctgggtgcggtggctcatgcctgtaatcccagcagcactttgggaggctgaggtgggtggatcacaaggtcaggagttcaagaccagcctggccaagatggtgaaaccccgtctctactaaaaatacgaaaattagccaggtgttgtggtgggcgcctgtaaattccagcaacttgggaggctgaggcagagaattgcttgaacctgggaggcagaggttgcagcgagccgagattgcgccactgcactccaacctgggggacagggcgagactccttctcaaaaaaaaaaaaaagaaaaagaaaaagaaaaattagccaagcgtggtggcaggcacctgtaatcacagctactcgggagctgaggcatgagaatcgcttgaacccgggagacggaggttgcagtgagccgagatcgtgccactgcactccagcctggggtatagagcgaggctctatctcaaaaaaaaaaaaaaaaaaaaaaaaaaaaaaaaaaggagagtttggcgttcatcaagcaacatttggaaactacagagaactagcaaggcaaagacgcccctcccatccctaagtcctgtaccactatggttgttgacattttgatatatttcctttcagccttttctattctctgtgagctttttaaatgcgtgtgttgtgtgtgtgcacgtgtgtgttttacataactgtgtgagcaaattgtttatacagccctgttttttcccctcttaaaatgtaagctgttcccctgttaaaacatctttggataaacacaatctctaatgtttgcactatgtttattcaaaagggcagcattgccagaggttgaagctgtttccaatttcctcccattataaataatcccctcatggacctccttgtgtgtcccagaggagggattcttgggccaaagggtgcggaccctttggcagagctcatggtcaaaaatctcggcagagtttcagcctgacccgaagctaagatgacctcatacggttaaagtgagattggactgctatttatttcctgaacgtttgattcatgactcaggcttgtcaggggatcttttttttttttttcttctgtatgtgcttggttgcaagaaacagaaatccattcacactagctcacgtcaaaagggcaagagaatcgcttgaacgcgggaggcggaggttgcagtgagccgagatcgcgccactgcactccagcccgggcgacagtgcgagactccgtctcaataacaaacaaacaaacaaaaaaagggcggggggtgttgtatccttcagcaagtaaagctcatattcagcttggactagctgtctgcggagcatgttgttggggtatatctaggctatgttgattgttgaaatactgaattatttccgtattggttggtaaatcattctgtctcaagtcgctccaatgacgtcctccaccaaggccactctagctgccctggtccctctcccaggacttcccagacctctccacaatgcaggaagtaaagggtcaatatcgggcacagaagtgaaccatgctgctcggtcagtgcccaaagtattggttgtgaaattcattttttcttttcttttttttttttttggagacaaattctcactatggaactcaagcgatcctcctgccttggcctcccaatgtactgggattaaggtgtgagccactgcacctggactgcttgtaaaatatttgatgattcgcctagatgcaagtaccagaacagctgactcaaatggcttaaattgtaaggggaatctgtggctggaaaatccacacttgtgctggcttcagccaaagttgacacaatggctcagccatgtcaccaaggactttcttttctttctttccttctttctttcttctttctttttttctttcttttctctctctttctttctctctctcttttttttttttttttttgacgtagtctggttctgttgcccaggctggagtgcagtggcacaatcttggctcactgcggcaacctccaattccccggaattcaagtgattctcctgccttagcctcccgagtagctgggactataggtatgtgccaccacgcccagctaatttttgtatttttatttttttatttattatttttttaatcattcttgggtgtttctcgcagagggggatttggcagggtcacaggacaatagtggagggaaggtcagcagataaacaagtgaacaaaggtctctggttttcctaggcagaggaccctgcggccttccgcagtgtttgtgtccctgggtacttgagattagggagtggtgatgactcttaacgagcatgctgccttcaagcatctgtttaacaaagcacatcttgcaccgcccttaatccattcaaccctgagtggacacagcacatgtttcagagagcacagggttgggggcaaggtcacagatcaacaggatcccaaggcagaagaatttttcttagtacagaacaaaatgaaaagtctcccatgtctacctcttcctacacagacacagcaaccatccgatttctcaatcttttctccacctttccccattttctattccacaaaactgccattgtcatcatggcccgttctcaatgagctgttgagtacacctcccagacggggtggtggccgggcagaggggctcctcacttcccagtaggggcggccgggcagaggcgcccctcacctcccggacggggcggctggccgggcggggggccgacccccccacctccctcccggacggggcggctggccgggcagaggggctcctcacttcccagtaggggcggccgggcagaggcgcccctgacctcccggacggggcggctggccgggcggggggccgacccccccacctccctcccggacggggcggctggccgggcagaggggctcctcacttcccagtaggggcggccgggcagaggcgcccctcacctcccggacggggcggctggccgggtggggggctgacccccccacctccctcccggacggggcggctggccgggcggggggctgacccccccacctccctcccggacggggcggctggccgggtggggggctgacccccacctccctcccggacggggtggctgccgggcggagacgctcctcacttcccagacggggtggctgccgggcaaaggggctcctcacttctcagacggtgtggctgccgggctgaggggctcctcacttctcagacggggcggttgccaggcagagggtctcctcacttctcagacggggtggccgggcagagacgctcctcacatcccagacggggcggcagggcagaggcgctccccacatctcagatgatgggcggcctggcagagatgctcctcacttcctagatgggatggcggccgggcagagatgctcctcactttccagactgggcagccaggcagagaggctcctcacatcccagacgatgggtggcccggcagagacgctcctcacttcccagacggggtggcggccgggcagaggctgcaatctcggcactttggggggccaaggcaggcagctgggaggtggaggttgtagcgagccgagatcacgccactgcactccagcctgggcaccattgagcactgagtgaacgcaactccgtctgccatcccggcacctcgggaggccgaggctggcggatcactcgcggttaggagctggagaccagcccagccaacacagcgaaaccccgtctccaccaaaaaaatacgaaaaccagtcaggcgtggcggcgcctgcaatcccaggtactcggcaggctgaggcaggagaatcaggcagggaggttgcagtgagccgagatggcagcagtacagtccagctttggctcagcatcagagggagaccgtggaaagagagggagagggaaaccgtggggagagggagagggagagcgagagcgcatcagagtattttaacagcagaattgatcaaacagaagaaagaattagtgagtttgaagacaggctatttgaaaatacacagtcaggccgggcccagtggttcatgcctataatcccagcattttgggaggctgaggtgggcggatcacctgaggtcaggagttcaagaccagcctggccaacatggcaaaaccccgtttctagtacaagtacaaaaattagccaggaaatggtggcatgtacctgtagtcccaactactcaggaggctgaggcacaagaatgacttgaacccaggaggcagaggttgcaatgagccgagtttgttccattgcactccagcctgggtgacagagtgaggctctttaaaaaaaaaaaaaaaaagtccaggcgcagtggctcatgcctgtaatcccagcactttgggaggcggaggcgggcaaatcacctgagatcgggagttcaagaccagcgtgaccaacatggagaaatcctgtctctactaaaaatataaaattagccgggcgtggtggcaaatgcctgtaatctcagctactcaggaggctgaggcaggagaattgcttgaacccaggaggcagaggttgtggtgagccaagatggtgccattgcactccagcctgggcaacaagagtgaaactcttgtctcaaaaaaaaaaaaaaaaaaaaaaaaagatgaaagaaagaaagagaaagacacagagacaaaaaaagaagagaaagaaaaagaaagaggaagaaagaaagagagaaaagaataaaaaaaaagaggaagaaagaaaggaaagaaaaaaagaaaagagaaaggagggagggaaggaaggaagaaaggaaggaacgaacaaacacagtcacaggagacaaaagagaaaaagttttttgtatttttaatagagaccgggttttaccatgttggccaggctggtcttgaactcctgacctcaagtgatctgcctgccttggcctcccaaagtgctgggattacaagcgtgagcccccgtgcccggccagaccccatttctcccatttctttttatctctctgctttatcttttccagtggaagctcccaagatgactacctccagcctctggccacagggaaccttcttcatatcccacaagcaaaggagagcacctttggctcaggtttcctgccaaagtaatgaggctaactctgattgggccaacagagggcacgtgttcatgcaagagccaatcactgtgatcggagggacagaaggaaaaaccataatggccagattggctgagccaagtcacatgttcctcaaatagtaaggtgagtggctcacactagggctgcaggagccacacctgggttcaatttccattccaaacaaatttctgtcttctctgccctgtttcccgtcagtaacatagagataatgaaggcactcatatggtagagttcccgtgaggattaaatgagttagttaatgcaaagcactgagaatggtgcccatatacagaaagcgttcaaatgttagcttctgttatcgtcattacatggccattctcacctcttaaggctgcttttctttgcaagctccttatgctccacacatttccctctttctagttactattgcttggtaacaaatcactccaaaatatggtggcccaaaacaacaacagtcatcctattatttttcactgtgtctgtggtcagagttttgggaaggacccaactgggcagttctgacttggaatttcatatggttgcagtcacttggcagctgaaactggaacagggaagcagctgggggtggatggatctctctctctctctctttctcttactctctccccactccatgttgtctcagggcttctcaatgtggtctctccacgcgaactggtttgggctccctcacatcatgacagcctctgggcagttggacttacatggcagcttcggcatccagtacaagtgttttatgaaagtagcagccgcgactgggtgcggttgctcacgcctgtaatcccaacactttgggagcttgaggcaggtggatcacctgaggtcgggagtccaagaccagcctggaaaacatggtgaaatcccgtctctactaaaaatacaaaaattagctgggcatggtagcacgggcctgcggtcccagctactcaggaggctgaggcaggagaatcgcttgaacctgggaggcggaggttgcagtgagccgagatcacgccactgcactccagcctgggcgacagagtgagactccatcgaaatgaaagaaagaaagagaaagagagaaagagagaaagaaagaaggaaggaaagaaagaaagagagagaaagaaagaaaggagggaaggagggagggaaggagggaaggaaggaaggaaggaaggaaagaaggaaaggaaggggccttatctcttctgatctagccttggaatcatgcagcattacttctgccacatagtcttggttacaagcaagtcacaaactgcctagatgtaaggggagcttacacaaattccacttcccaatggaaggggtatcaaagttctagaggaatatatgggctgggaaacattgttgccaccatctttggaagttacatctggcttttactggtactgatttaagacccacctctatacagcctgtgcccaataacatccacctgggcacagctccaactccctgttctaaacagaaatagtttattgagaaatctcaatcccttgggatcaaaaacatgacagtttccatttgttctgcagtgactgctctctacctgctatctattgttttccaagactatgatccaaaatcacagcatccaagactgtgtcttttttatttatttattgttttcgagacagggtctcactctgtcgcccagactgtagtgcagtggcgcaatctccactcaccgcaacctctgcctcccaggctcaagagattctcctgcctcagcctcctgcgtagctgggattacaggtgcacaccactactgcctggctaatttttgaattttcagtagagacagggtttcaccatgttggccaggctggtcttgaactcctgacctcaaatgatccacccaccttggcctcacaaagtgctgggattacaggcatgagccaccacagctggccccaagactgtgtctttattattattattatttcgagacagagtctagctctgtctcctaggctggagtgcagtggtgcgatctcagctcactgaaaccttcaccttgccagttcaagccattctcgtgcctcagcctccggagtagctgggattacaggcacgcaccactacacccggctaattttcgtattttcagtagggacggggtttccccatattggccaggctggtcttgaactcctgacctcaagtgatccacccacctcggcctcccaaaggtggctcacagaagtgagccaccacgcccggcctgtctattatttttatttttaaaaataaatgtattgttaatttcctttttcctgttggataaaggctacagggaaacttaatgacaattttgctagagtctttaatatttctctcattttcattcatttaaaaacatagccttcaggccaggcacggtggctcacacctataatcccagcactttgggaggccgaggcaggtggatcacttgaggtcaggagttcaagaccagcctggccaacatggtgaaaccccgtctctactaaaaatacaaaaatttaaaaattagccgggcatagtggcatgtgcctgtagtcccagctactcaggaggctgaggcaggagaatcacctgaacccaggaggtggaggttgcagtgagctgagatcgcaccactgcactccagcctgagcgacagagtgagactcggtctcaaacaaacaaatacacaaaaaaacccacaaagttcatggggagggaaaggtgtagcctctcttgagaactttcctctctcattttccccccaaacaggatgatgcttcctttctcttctctatccttttctggacagccttgggtcctctcagtaacttatttgggtaagtggctggttataatggcagtgacctcgaacttaggctctggggtagttggccacttttgtcctcagttttgggcagtagtagcaattctggaagttctgggaaaaatccaatttgacatcatagtacgaacctgaaggaaaggtcttgatcccaaagagctctcggcagctcatggctgtgactgtcatccagggcctgggcctggggaaatgtttggggatctgtgggatcctttagggactgtcacagtgactcgggaaatgttgctataggcaactgttctggaactttttggtcttaggactcttttacattcttaatagtatcaaggaccccaaacagcttttatttgtgtgggttataacttttttttttttttgagatggagtttcattctagtcgcccaggctggagtgcaatagtgtgatcttggctcactgcaacctctgccccacaggttcaagcaatcctcccacctcagcctcccgagtagctgagactacaggtgtgcgccatcacgcctggctaatttttttgtatttttattagagacagggtttcaccgtgtcggccaggctggtctccaactcctgacttcaggtcatccatccgcctcggcctttcaaagtgctgggattacaggcatgagccactgcgcccggcctgtgtgggttatagctattgatatttaccatattagaacttaaaactggccatttaaacaaattttttattattgattgatttttgagacagggtctcaccctgttgcccagagtggagtgcagtggcatgatcacagctcactgcagcctcgaactcctggcctcaagtgatcctctcgcttcagctttctgagtggttgggactacaggtgtgcaccaccacacccaactaatttattgatttttttgtatacacagtcttgctgtgttgcctaggctaaaactgacaatattaaaatccagccatccacaagcacacactggcagagcaattatgtcatcacatgtcatggagccattgtatgctcataagtgaatgagattgaaatacgcaaaaaaagtcctggaattattatgaaagtaattttggccgagcgcggtggctcacgcctgtaatcccagcactttgggaggccgaggcgggcggatcacgaggtcaggagatcaagaccatcctggctaacatggtgaaaccccgtctctactaaaattacaaaaaaaaattagccgggggtggtggcgggcgcctgtagtcccagctactccggaggctgaggcaggagaatcgcggagcttgcagtgagccgagattgcgccattgcactccagcttgggcgacagagcaagactccatctcaaaaaaaaaaaaaaaaaagaaagtaattttaactttgtggacaaagtctcagggacctccaggaaaccctggaccaaactttgaaacttgctctaaaagcatttgtaagcctgggatggttaggtatgttcaacgtgcagccatgtaggagatagtgcatgtcaaaagggcccctttggatgggttaatatcactttggttcagttatctgtggcctggaaggggtcccttgtgtacaaacaaagctggggagtaggagggaagaatttttttttttttttgagacagagtcttgctctcgtcccccaggctggtgtgcaggggtgtgatcttggctcaccgcaacctctgcctcccaggttcaagcaattctcctgccttagcctccctagtagctgggattacaggcacctgccaccacacttggctacgttttgtatttttagtagagacggggttttgccatgttggccaggctggtcaaccctgacctcaggtgatccaccctccttggcctcccaaagcgcagggatttacaggcgtgagccactgcgcctggcccaggagggaggaatcttaaccataatgctcatcttgtactatctactggaaaccctaaaaatacagagaccctggagccactttctgggttctgctccccttcattgctttctagctgtgtgactttgggccaagttccttaaccactctgtggctcagtttctcttctggaaaatggagacaataatagtatctgcctctcagcgttgttataagagttaccttggcacacagtgttatgtgggtgtttacgctgagtattactgttattacagtaatcattcaaatccaagaagccatcaaaggtaagatgcattgttttttattttattttattttattttttatttttattttgagacagagtcctgctctgttgcccaggtgggagtgcagtggtgcgatctcagctcactacgacctccacctcccaggttcaaacaattctcctgcttcagcctcctgagtagctgggattacaggtgtgccctaccacgcctaagttttgtatttttagtagagatggggtttcaccatgttggccaggctggtctcaaactcctgacctcaagtgattcacccgcctcagcctcccaaaatgctgggattacaagggtgagccaccacacccagccaagatgcattgtcacttcaaatccccaggggagaaaaaacagctgccagttaaactatgacacataatcatttataagacacatcctgatttccaagtcattgaaaaggggtggggaggataaataagtcaattaaaaatggttttattcggcctggcgtggtggcttacgtctgtaatgccagcactttgggaggctgaggtgggtggatcacgaggtcaggaagttcgagaccagcctggccaacgtggtgaaaccccgcctctactaaaaatacaaaaaattagccatgcctagtggcacaggcctgtaatcccagctactcgggaggctgaggcaagagaatctcttgaacccagaaggcagagattgcagtgagccaagatcgtgccattgcactccagcctgggtgacagagcaagactccatctcgagaaaaaaaaaaaaaaagatggttttattctggaataggagagtatttaaggaaagaaaataaaaaataaaggaaaaaaagaaattttaaaattaaaaaaaatgatttcatgtgtacagaagaatttagcaacaaggatgtccaccacagcacttgtcataatggcaaacctgctgaaaccccaaccattatggattaactgcacaagttaagagagagccacaaaatattgtgactgaaggggttttcaaagattgttccaaaaccctggggatcctcaaaagtgaatcaatttctctctttcataatctttttcatcttcactctcctatgagtgcataaagcaaaaaataataagcaggtgacttctaaaaagaaaaaacctctggaaactatgcctcaaccccattctagagcctgctgggccactgctcagaaaaggaaatgtgtgccccaggctgacccactcttaagacaacccattctccacatgcctctgccttcagttacacagctgtacccagagaggggtcttgtctttactcagctgtccatccaccctccctgtgttgcaatgaatacatccctggtatcttctgtgcctggccccagcccaccccctcctcagagctccagccacacattccagtgccttcgagactcacctgctttgaaaggtagatccttacattcaattttcttgttgaaatacttcatgtggtttcttttttcttgacaagcctctgaccaacacttggtggtcattcttaaaccgttgatttttccccttcacacctattcccctccacgatcacaatcttcccagtctcaaaaatgtctctacctgggacctcaagccagaaacccaggcaatatggaggcacttcctctcctcattccacatatgccactcatggacaattcctgctttcctctaaggcagatgcttaccacacccctacccccacccttctatttagaaaatttctaaacatgcaaaagaattgcaagaaaagtagaagatataataatatactgtggatatggattcactaggtttttgcagttttttgtttgtttttgttttgagacggagtcttgctctgtcacccaggctggagtgcaatggtgcgatctcagtgcaagctctgcctcccaggttcaagcaattctccctgcttcaaccttccaagtagctgggattacaggcacccaccaccatgcccagctaatttttgtatttttcagtggagatagggttttgttacgttggccagctggtcttgacctcctgacctcaggtgatccgcctgccttggcctcccaaagtgctggattacaggcgtgaaccgtcacacctggccttttgtgtttttgtttttgttttggtttgtgtgtgtgtgtttgtttgtttgtttttgagatggggtttcactctgttgcccaggctggagtgcagtggtgtgatcacagctcactacagcctcaacctgctaggctcaagcgatcctcccttctaagcctcttgagtagctgagactgcaggtgcccaccaccacacccagctaatttttgtattttttgtagagacgggttttcaccatgttgcccaggctgttctcaaactcctgggctcaagtgattccccccaccttggcctcccaaagtgcttggattacaaacgtgagccactgtgctgggcctatttctttgtgttttaagaggcagggtctttctctgttgcccaggtggagtacgatgattcgatcatagctcactgcagcctcaaactcctaggcacgggagaccctcctgcatcagcctcccgagtagcccagactacaggtgtgtgccactatacctagctaatgaaaagaatttttttgtagacatgagttcttgctatgttgtctaggctggtctggaacctccagcctcaggcgatccccttgcttcagtcttccaaagcagtggggttacaggcgtgaaccacctggcctggtctcgctctttctctttcgacatctacattgatctgtagctatctacgtactatagatatctaaaagttatgtaaatgtctacttaagcttataggtatgagctactgtatgctatctaagcttataggtatgagctacaaattgctattgtgttatgaggggaattcaaaaagttgatggagaatggaattaagagataaaaattttaaaaaaatctttatttctcaccataaactccatcaaggtcaaagtcaagacacttttgtaaaccattataccagccatttagtctatccctaaataactgagggtcccaggaatttaatcatgtcagtgcagcctttttacattttctctttctttttttttttgatggaatctcactctgttgctcaggctggagtgcagtggtatgatctcggctcactgcaacctctgcctcccgggttcaagccattctcctgcctcagcctcctgagtagctgggactacaggcatgtaccaccacatctggctaatttttttttttttagtagagacgaggttttgccaagttggccgggctggtctcaaactcctaacttcaggtgatctgcccgcctcggcctcccaaagtgctagcattacagttgtgagccactgtgccaggccttttttttttgttcttgttgcccaggctggagtgcagtggcatgatctcggctcactgcaacctccacctcctgggttcaagtgattctcctgcctcagcctcccgactagctgggattacagtcatgagccaccacacctggctaatttttgtatttttttttttagtagagacagggttttgccatgttggtcaggctggtcttgaactcccaacctcaggtgatccaccctccttggcctcccaaaatgctaagattacaggcgtgagccactccgcccagcccagtctttttacattcttaactgaagaaaaatgggtgcccttcaaagattttaagattaggaaacaaaaagtcagaaggagccaaattgggactgccaagtggatgcctaataatttcccatcaaaacttgtaaaattgctcgtttgatgaggagaatgagcagaagcgtagacatgctggagaagaactctctggtgaagcttcccaggcttatttctactaaagcttcggctaactttctcaaaacactctcataataagcagatcttattattctttgaccctacagaaagtcaaccagcaaaatgccttgagcatccccaaaaactgttgctatgacctttgctcttgaccagtgtgcttctgccttgactggatcacttccccgctcttggcaatcattctctgattacgatttgtctttaggattgcacccgtgaaaccatgtatcatttcccgttacaatccttcaaggaaatgcattaggatctcgatctcacttgtttagcatgtccatggaaagctctgctcttctctgcagctgatctgggtgcgaccgttctggcacccatcgagtggaaagtttgtttagctttaatttcagtcagaattgtgtaagctgaggccgggtgaggtggctcaagcctgtaatcccagcagttcgggagaatgaggcaggaggatcacttgtgtccaggagttcaagaccagcctgggaaacctaatgagacccccatctctacaaaaaatacgaaaatttagtgtcaggcctctgagcccaagctaagccatcatatcgcctgtgacctgcacgtatacatccaggtggcctgaagcaactgaagagccacaaaagaagtgaaaatagccttaactgatgacattccaccattgtgatttgtttctgccccaccctaatgatcaatgtactttgtaatctcccccacccttaagaagtttctttgtaattcttcccatccttgagaatgaactttgtgagatccgccccctgcccgcaaaacattgctccaaactccaccgcctatcccaaaacctataagaattaatcataatcccaccaccctttgctgactctctttttggactcagcctgcctgcacccaggtgaaataaacagccttgttgctcacacaaagcctgtttggtggtctcttcacagggacgcgtgtgacacttagctgaacgtgctggcacgcacctgtagttccaactacttcggaggctgaggtggaaggatcgcttgagcccaggaggttgaggctgcagtgagccacaatctcaccactgtactcagcctgggcgacagtatgagaaccctgtctcaaaaaaaaaaaaaaaaaaaaagaaaaaagaattgtgtaagctgtaccaattgagatgtctatggtgttggctattgtttctgctgttaactgtaagtcctctttaattaaggcataaacaaatttaatttttttctgcaaaaattgatgtggatggtatgccacggtgggcttcatcttcagcatgacccaggctggagtgcagtggcgcaatcacggctcactgcaacctctacctcccagactcaagtgatcctcccacctcagcctcctgagtagctggaactacaagtgtgcaccaccacacccagctaatttatgtattttttgtacggatggggtttcaccatgttacccaggctggtctcgaattcctgagctccaatgatccgctggcctcagcctcccaaagtattgggattacaggcgtgaaccaccacgcccgaacttgtcccttcttaaaacgagttatccatttgtaaatggctgatttctctggggcactgtcaagtttttggaaaacatcaatgatttcatcattcttccacccaagcttcaccatcaatttgatgcttgttcttgcttcaattttagaattcgtgttgctctgataggggctcttttcaatctgatgttttattttagtgtctcaaactaggtcctgttcagacaagttataacaagttagtatgaatttattttggtgcaaaaaaaaaaaattgaactccatgcatagttttttcataatacacattttccatgaatttttggaagacccttctttttctctcttttttttttttttttttttttctgtagagatggtcttgttctgtcacccaggctggagtgcagtggcacaatcatggctcactgcagcctcgacctcctgggctcaagcaatcctcccacctcagcttcctgttactgggactataggtgtgcaccaccacaccttgataattaaaaaaaaaaatttttttgtagagatcggggtgggggggggggtctcactatattttccaggctggtcttgaactcctggcctcaagtgaccctccccaatcagcctcccaaagtgctgggattacaggcacaagccacagtgcctggccaataaatgttttttgaatgaatgaagaaattagtgcatggacatattttcccatcagctattacaataaccagactctgagttccctgaaggcagggcctgtgagtttcattgtgtaccctcagccctcaatagctgataaaaataaatattcagaaaatgcttgtaaaatgaagaagagaatatgtatgggacagaaagtagaccagtggttgcctggggctgggacagggaatagggagcgactgcaaatgggcagaagggatcttttcagagtgatggaaatgttcttgaattggctgtgatggctgcagaactgtaaaatcacccaaaatcagtaaatcacttataataggtgaattttatgacaggtagattatacctcagtaaagctgttaaaacaaaaccagtgttgagggaggaaataaatgttaccttggtaatactgaggactcagtagttatcaagacagctctcttccctgccctcatgaggttttctgtgcagggcggggacgccgacccattatagacagtgacagcctagagccatcacggcgggatggtggggaggggacaggcagaggggtgggaggccaggatgggggaagcccgggcagagaggttgggctggaatggggggcacaggcagaggggtcggggcggggactggtgaggtgcaggcagagggcaaaggggtcgaggtccagatgggagatgtacaggcagacggatccgggccagggcggggaggtacaggcccagttgaggagcataaggaaccataggagcccaaaggaggcgcccgaccagtcagggaggacttcccagaggggtgaatggctgagccagggcctgaagtataatgttcatgaatgcgacagcaatttttttttttttgagaccgagtctccctctatcactggagtgcagtggctcgatttcggctcactacaacctccacctaccgggttcaagcgattctcctgcctcagcctcccgggtagctgggactacaggcgcccgcccccacgtccggctaatgtttgcatttttagtcgagacggggtttcgccattttggccaggctggtcttgaacccctgacctcaggtaatgcacctgcctcggcctcccaaagtgctgggattacaggcgtgagccaccgcgcccagcacaattttaatttttcttaaacacttttcctgccttagcaaagtcttggaggggcggccgcccaggcgccgcgagcgcaagaccacgagggggcgctgcttcaccacgctagaggagcgctcccggcaaccacgtggccccacaggtgcgggaggtcggcgagcgcgcctggagggtggacggggtaggttacggccaggcagcccggggtggcgcgtggccctgcgcagggcagtggaagcagcgggccccagggagcatgagacgccgcgctccgtggggcggtcccagcgctgtgcagcgaggggccagggctgtccccggtcctgcgcggccggctcccggagaaactgtggcctcctgggggtggagctttaaaaaacaaaacaaaacaaaacaaaatcacccaacaggaagcggggtgggggcgcccggctctgtcacccgtggaatgcatcaaaatagcctgcgcggccgggggcggttccgggaaagggggcggccgcgaggggcggggctgcaacggagggcggagcttcccaaagaacgggagagaggagtgcagaaccggccccagggggacgtcctcctgttcccccaaaatgacctcgataggcgtttgtgtgggatggggttcctgggtagggcggggctttccagtgcgatgtccctggtctattcttagcgggctgaaacctggagaagtgggagtgggcggttgatccgggttccagggcctctttggagcgaaaagctccgtggagagccagagtctccatcctgggcgtgggagggaagatgggaaatgggccaagaggagcctgtgggaggtcctccccgggacggcccccttccatctgcatccgcgggaaccgttgtgggggcagctctgagaaaggctgctctgggcgcaaggaagggtggttgaacgaagagatcagtcagggacggggtgggggtgccttgactgtgtcccagatttgctgcgtgcttctgacctcagttccccatccttccagttgctcaaatcctctctgtcccagtcctaggccgtttctgcccctctcacttcctagtggtttgcagaggggaaacactgaggctgcctcttctgtgcctggccctgtgttggcacggggaagtgactgagacgccccagacccccttctccctcacagtccagtgaggcagacagacctgccaccagatagtgacagcccagaatgagtcattgagaggacgggggaggcacaggcagatgggtcagggctgggataggggaggagaggggcctgtaggatccaaggggagagtgggtgctgctgactcagtctgggggggttgaagagccgtctgaacttagaccaaaaaggtaggatggggccgggcgcctgttatcccagcactttgggaggcagagacaagaggatcgcttgaggccaggagttccagaccagattggacaacatagcgagacccccatctctacaaaataatttaaaaatcagttgggcatagtggtgtacgcctatagtcccagctactcaggaggctgaggtgggaagattggttgagcccaggaattcaaggctgcaatgagctatgattgccccactgcagtccagcccgggtgacagcgtgagacccctgcctccaaaataataatagcaaaaatactgggctgggcgcggcggctcacacctgtaatcccaacactttgggaagccgaggtgggcaaatcgctgaggtcaggagttccagaccagcctggccaacatggtgaaacccagtctctactaaaaatacaaaaattagctaggtgtggtggcaaggcatctgtagttccagctacttgggaggctgaggcaggagaatcgcttgagcccaggaggtggaggctgcaatgagatcacaccactgcactccagcctgggcgacagagtgagactctgtctcaaaaaataaataaatcctaatgaaaggataggatggggctcagggccttggaagagggtcaccttctaacaaaaggtatttgaacggagtcctaaagaatgagtagcattcttctgggaagtgctgtgtcaccatgaaggaaagggtgttctaggcagaaagaatgacaaatgcaaaagcttggaggtgagagtgtggcttatctctggcagggtcctctgctccctgcctgggacattcccccaacgtcataccccgacagagctgtcttaggtctcctagtcctggagtccacaagcaggttaatgggatgtaatggaaacgctatagagggcagacccctaggcttgttccctcacagcctgatgcttttttgtttttgagacagagtctcgctctgttgcccaggctggagtgcagtggcgtgatcttggctcactgcaaccttggcctcccaggttcaagcgattgtcctgcctcagcttcccaagtagctgagattacaggcacccaccaccacgcctggctaagttttgtatttttagtagagacggagtttcaccatgttggccaggctagtctcgaactcccaacctcaggtaatccacttgcctcggcttcccaaagtgctgggattaaaggcatgagccaccacgcccagccttttgttttgtctgcttttttagacagggtctcacgctgtcaccctcacaggctggagtgcagtgactgcatcacggaccactgcagcctggacctcccaggctcaagcaatcctcccacctcaacctctccagcagctgggactacaggcgtatgccaccacgcccacctaattttaaaattattttgtagagacagggtctcattatgttgcccaggctggcctcgaactcctgggctcaagcgatcctcccaccttggcctcccgaagtgctgggcttacaggtgagagccacctcagtgcccggcctcagcctgatggtttcacgactgcctttgactttggcccacactaatcaaatgtatcaccgtgggccactgactcaacttccccatctatccagtgggaatagaatattggactgcacaaaatcaaccacctcattttaaagagctataacgaaacaaaatttatatgttatatatttttaaaaatacatcttatagattaaaggactcaagaaacaatagcaagactgtaaaacgttgccacatcaggtgacactttggccagagttatggaaaatgctgacaaaacaagaatttgccagcatgggcaaagatatactgttaccaacccaacttgttaaaatattaatattgagctaattagaagtagtttttttttttttgttttttttttttgagacagagtctcattctgttgcccaggcaggagtgcaatggtgtgacctcaggtcactgcaacctctgctgcctgggttcaagcgattcttgtgcctcagcctcctggaattacaggcgcctgccaccacgcccggctaatttttgaatttttggtagagactgggtttctccatggcggccaggctggtctcgaactcctgaccttaagtgatctgcctgcctcgacctcccaaagtgctgggattacaggcgtgagccactgtgcccagccagcagttcataatatttgttttttattccttgattctaactctgtaaggaatagaaatggggtgattaattttggctcctttaatacccgcctggcaggtgctgagtcagtggtacctgttaccacgctatgactcagaggttatcactcagggacatccttctgactctgtttcagtccatgactcaggaggaaaggttctagggcctcaccagcgccctacacacaccctcgtttcccgaggggcaccattatattcttcctttattggctgtccttgtataatacaaatcttcaagtttagatacaaaaaaaatctggaaataaaagatagaaaagtacccgccaggcaccccttccccttcttcccggacccctccccagcgggcaccgacatgaggtaactgcgcatcttctcctcctcctccctccccgcctcctgggcccccaacttggccctagcccccatgagaccttggcccaaggaagacatgggccccaaagttggagggtgatggaggtgagtacagcattggcagtgaacgcagcgtgtgggcagagggcagcccttagcttgtgctgtgcatggggggaggagacgaccagatttggggtgggcactggtgtggggcccaggagagcccctaagcaagtgtcccccctccatcctgtccaacactggaaggtgggggtcaacagaaactgggaaatggagtgtgaaccaagggcattcagtgggattgtggccaacccctgtgtctggggttggggaagggggcattgccagcctaagtccggcagtgaaatggttcccttagccaggctgggtccgtccctgaattccatcctgttgcaacctgggcgtcacaatgttggttctgtagtggttgtcggggtggttgagggaggggggtgttgagagggtgttgaggggcgcagccccagggagcagggttaggggagaggttgtgcctccacccccaggcgtggggcacctggagatgatggagtgggtggggcggctcgggctacagttcaatctcgaatgtcttttgcaggtcgccagaaaaggggttggagggtttctctacagtggctttgccttctaatgccgcccactgggcctcaaaggggtccaactctggagctggggcaggcgctggctcagggggccagggggccccattggggcgagggcgggcctggctcccaggggcactgggtatggcagggggcgggaaggccccagctttcccaagcagagtggcaggctgaggctggagctgggcggctgagcagaaggcgtttgccaccatctgtgagggtgtgatgcccaccacgggcacccggggcatcggtgggtagcccaagcccgggtaggcgggcacaaaagggggctgcatgtgtgggggtggcaggaacacggccacttgggcaggtgcagcgtcaaagggccccacgggggcggggaaaggctgcagggcaggaggcatggtgggcactggggccactgaggctgcttgctgctgttgctgctgctgctgctgctgctgttgctgttgctgctgctgctgctgctgggccttggccacctgtgacacctcctccagccatcgctcagcctctgaaggtgtccgcttgtgcccaggctggaaggcagctgcagggggcacggagggctcaccccaggcagaagtccctggagagaggagagggacaggtgagggagggggcaacggcttcagcagaagaaccccaggctgggaactggcatggtgtggggatcagagcacggactctggagccagaccgcctgcctctgaatcccagctctgcacctcccgagcttgctgacttcaggcgagtgacttcaccattctggaccacgtaatggttctggagtgctaagaacatacaattctgagcttctaaggccctatgatgagaaagtctaagtaggactgacatcctcctagccccactacccttctgactggtcagtgccaagcctaggattcactattttgttttgtttgttgtctgttcgttttgagagtctcactctgttgcccagggatgccctatctgggctcactgcaacctctgcctcccaggttcaagcaattctcgtgcctcagtctcctgagtagctgggattacaggcgcgcaccattacgcccggctgattttttgtatttttagtagaggcgaggtttcaacatgttgcccaggctggactcgaactcctacctcaagtaatccccctgcctcggcttcccaaagtactaggattacaggcatgagccaccacacccagctggtattcactattttgaatatcacccttgattttctaataccttcagaatgtattgttttaggagttaagattctaagattgcatggatctttctccacatgtataatagtatcctaacatagtaaggtttgacagtttagggttgggctttctaagattctcgagttctacatttacagtgtttgagattctaaggtgcacctgtggttctaggataagcccatggctctaagatgatacatggttctcaaggattccatggttctgaaacgatctctgggctctaaggtgatcccaagattctagcatgagcacatgcctctgaggtgaccccgtggctctacaatgatcccgtatctctaagataattcatggttctaaagtgatcacttgattctcaggtaatcccacggctctaagatgatccttggttctaggatgatcctctggttctaagatgatctgtgtttctaaggtgatcctatggctctaagatgatccatagttctaggatgatcccatggttctaaggggatcccgtggctctaaaatgatcaagggctctgagatgatccatggctctaaggtgatcacatgattctcagataattccatggctctaagatgatccatggttctaggataatcccctggctctaagatgatccctgggtctaaggtgatcacatgattcttaggtaatcccatggctctaagatgaaccacggatctaggatgatcccctggctctaagatgatccatggctctaagatgatcacacgattctcagataatcccatggttctaggctgatcccctggctctaagatgatccctgcttttaaggtgattgcatgattctcaggtaatcccgtggctctaagatgatccatggatctaggatgatcccctggctctaagatgatccatggttctaaagtaatcgcatgattctcaggtaatcccatggctctaagatgatccatggttgtaggatgatcccctggctctgaggtgatccatggttctaagcctgtaggatcccaagacccctggagtgtctgggtagccctggatagaggaggggatacaggagggacatgcagggtgtctgcccagcagaaagcctggctttacctgttgtggcaggtggtggccctggtgctggcgctccagcactggcaaaagatgaactgatctgtgtgcacagagcgttgatgctgtcactgtcgccggcaccaggaggctccatctcaggcactgggaagcagggcaggacagaggtcagcaaacaggcccagaccctgccgcagccccgccctctaccccccgccctcggtggccctctcttctgacctggatcctttcccactgtagtaactaagtggccatgaccgccaaataactgtgcatatgtgtgtgtcacatctgagcggcagaacgactgagttagtgtgtgacatttgacggctgacagtaacagggaccccaaaccaaggacctcaagatttgtgtgtggccacaaaccagaagagttgtctaaaacacttagcaacatatattagtttaaaaatatgcccaaccacgtgcatggcaaggacatgggcccagtctgaatgggctgtggcatggccgctcactggctggggatcatttgtccagctttgggcagagaagtggggtcctgtccaccccacccaggctgatctatggcaaacatcatgagagcagagatacacctgtgccagcaaggcaggagacactgagcaggcatggcggccccgtgagggcttgtgatgagcaaaggtaccatccaaataaacaattaaggactcccatgtgtggtgtgtgacacatgtctgtgatgttttagccaatggctgtctccaagggaccatgtagatgctccagtgaacatcagaactggccgtaggagtctgcaggtgtgctgcgggggcgcccgggtgggacagccaatgtcgacaatgattgtgcatgttcgtccaaacaggaatgcagcttctgagagtgtgactggggtccgggtgtgtggcgtcctgatgcgtgactcccaggtgtgagtgcatctgccgtgtgatgtatgagtgtgtttgcaggtgtgcatggatctgcacatgtggctttggagtttgcataaatctgggtgtgtggtctgtgaaggtgtgtaaatctgagtgtgtttcttttttaaaaatatttatttatttatttttgacacagggtctcgctctgttgcccaggctggagtgtagtggcacaatcttagttcactgcaacctccgcctcccaggctcaagcaatcttcctgagtagctgggactacaggtgcatgccactgcacctggttaacaataaaggttaatttttaaaatttttttgtggagatgagatcttgctgtggtgcccaggctggtctcaaactcctgagctcaagtgatcctcctgcctcagcctcccaaagtgctgggattacaggtgtgagccaccacgtctggccatgtgtgacttctgactctgtgattttggagtgtgtgtgacttgagagtatacctgactgtgagtttgtgacttctgagcatgtgtgacatgtgtgtgggggggtgcaatgtctatgtgagtatgtgaaatttctgtgtggcaagtcacatccaaataagcgtgcagctggccacaggagtgtgaggcttccaaataaagcctggagctcctgccacctctcaggagcacgtgtgacagcctggggagtgtgcctgatgtcaggctgcgttaaggacagcaaatgtgagggtgtgtgatggcccaggaatgctgcaggcatggagggagcgtgcgtcactctcaacaagggttggcatctgctcaccggttaccttttggagcagcccagcctcctggatacagctcaacaccctcccacatcaatccccgaggacataacgggtaggcgatgcagatttggcatccaggagcaagagagtgggccagaccacatgggttcactggctgctggtggggaagacagcccttctgcctgcctccctcaggcaaaaactcagtagcgtgccacctctatcttccttccctatggcagagattgctcttaatttttttttttttgagacaggttctcactctgttgcccaggctggagtgaagtggcgcaatcttagctcactgcagctgggctgaagcaattctccttcctcagcctcctgagtagctgagactacaggcatgcgccaccacaccaggctagtttttgtatttttttgtagagacagggtttagccaagtgatctgcctcaagggatccttgagcccctcttgggctcaagtgatctgcctgccttggcctcccaaagtgctgagaccacaggcatgagccactgcacttggctagacatcacttttagatcatgatgtacaccacctgtctcctttccctggcccatggcagacattagtaatcaaacacaatgcttttttcccccacggagctctttgctcaccttacccgtcacctgtccagacctcatggctcccctggccaagtgctagaagaaacagatccttgtaactccatcttccctccaagtaaaacaggacctttatatctcctctctcttaccaccagccatggcagacaatgccaatcaattatgatgtgctgctccttttcgtgatgggtactgcctctgctcaactctgtgcctacaacaaatgttcctgatccatcactatgcccctgacccctgggatctctgagctcactggtgccctgcatgtcatgtttctactgaccaaattctgggagtctcccctttgggtaaaaacataacactcttgctactctttcttctcccttgcccatgacacacactgcatggagatcatgactgctaaccgatcatgatgtgtgccatctttctcgtttcccttaaccacagcagacattgctaattgatcatgacttgtgatgccttttttgccatcccttgatgctccctgccctaggcagacatttctaatccatcacaatcctcctttcctcagagcctgaggaatacctgtatccttcacctagccagatctcataggtgaatgcttggagggagggagcattaacctgtagtgcttcagtctactcctgagcaaaaacaggccaatggtgttgcttctcttctttccctggcccatggcaaacttccttatccatgcccgacttctttgtccatagccgactttgctaactaatcatgatgtgtgtcatctttctccttttccttaaccacaccagacattgctaactgatcataacttgtgatgcctttctactatcccttactcagagcagacacggcttatcaatcctgatttgtgctatctctttcctctcccttgcccactgctaatcgatcatgacatgttcccactctctctcctttgcccatggcagacagtgcaaatcaatcacagtgtgaaccatctcgcctccatcccttgcccacatcagatagtgccaattgattccaacgccgtttcccactgggcccagggctcacctgtgcccttcacctggaagtcagtgcggcgctgcagcgtggatggcagctcattcagccgtaggctcagctgccgtttgaaaggcgagttcttctggctgagtgctgggaacccacggaaggagccctggcgaaccagctgctccaggggtgcatggcgccgggggatggcggccgcagtggtgcctgcagccacaggggtgcctgcctcacccttctcaccaggggatgtggtggctggtgtcggggacacgtgcccaggctgggcagggccaggagccacagtgggggcagctgctgcctctgctggagacatgggggagatggatggttagatatctcaccatggcatgcaaggcctctcccacctggttctcttgatcattctccaaggctgccttccttgcccagtgagtcctgcccttaagacaagctagtcaaagccctgagatatccctcacccccacccaagtcatgatccccttccccaggaggctcttggaaaaccgtcccccaggctcaccctctgtgtctctccagcttcctgcccctttctgtcttgccctgctgctctcaccattcttccctctaagaccctctatctccctttttgatcacttaacaaacactgatttggtgctggaacaacgtatcaggcattgttccagatgcttttcaagtattcactcattcaatccacacgactacccatggggttgatatgattctcattttacagatgtggaaactgagacccagcaaaggcccagtgtgatgtgcccaagtcctactgctaggaaggggcaggctgactctggaccccatgctccaaatgactgcccgccctgtctccctctgacctgtctctccatatcatgttgtctttctctgtcactgtctgttcccctctgtctcccacctcccagccttcttcccacctcaagtagctcctcccttcctccagtcattctagacatggcttggatgcttcatcctctgagaagctttccagattgttccaggctctcagcctggctccctccactctgagactgttctctgtactctgggaggaaacctgacctccccactcagcaggagaggcaggctcttcaagggcagggctgccctcacccctgccaaaccacaaacacacatctaccctcctaccagggcctccccgagctgcagcctgaatgccatggagattaaactcaggcccagagagaccctcccataaggatgtcgcccagtgctgcttctcccatcgtgacacaatggggcacccatgcaggcctggcccaaggcagtggaaacagcccaggacaggttggaaccaggaaacctcctctgcctccactcactgtgtgacctcaggaagtcccctcccctctctgggctccagtttgccaactagaaacctgggataaacatctcagtgctacctcccaagcctctgagagggtcagtttaggtagtgaatgttaaatgttttggaatccaacaaaagcatgcctggacacagtggttcacgcctgtaatcccagcactttgagaggccaaggtggggggatcagttgaagccaggagttcaagaccagccttgccaacatggtgaaacaccatctctactaaaaatacaaaaaaagattagctgggtgtggtggcacacgcctgggattccagctactctggaggctgaggcaggagaatcgcttgaacccgggaggcagaggttgcagtgagccgagatcgcaccattgcactccagcctgggcaacagagcaagactctgtctcaaaaaaaaaaaaaaaaaaaaaaaaaaaacttagctggacgtggtggcgggcacctgtaatcccagctactcaggaggctgaggcacataaatgtcttgaaaccaggaggcagaggttgcagtgagctgagatggcactactgcattccagcctgggtgacggagagagactctgtctcaaaaaaaagatgttcttttttttccccttacaatccaggatctaattcaggatcacatctcgcatctattaatacctgttaaacctcattagtctcccttaatcaggatcagttcccaatggtaaattctttgtaaattctaagtagtgttttcccaaagaacttaaattcacagtaaaataaataaataaattaattaattaataaataaattaattatatggtgactcaggacatacatacaattatattttaaacacacacacacacacacacacacacacacacacacacagagttttagaacttacaaagtatttaaccatttacctagaaagttagttttaccaagtatgtttcaaactttcttgatggcaatccagagttaagagatatcttttatatggtagcctcttacacacgcgtgcacacacacacacactctctctctcaaataaaagtatcattaaattatatttaacccttatgccattcaatatactctgatattttctatgattctctatttcattgtttttaaattaatttttttttttttgagacagggtctcactctgtctgtcacccaggttggagtgtggtggtgcaatcgcagctctctgcagcctctacctcctgggcccaggtgatcctcctgcctcagcctcctgaggagctgggaccacaggttgcaccaccacgcctggctaattttttaatgatttgtagagacagggtttccctatgttgcccaggttgatttcatttttttaaatgtcagccacatgggctgggcccagttgtccacacctataataccagtgctttgggaggctgaggtgggaggatcgtttgaggccaggagtttgagaccagcctgggaaacacagcaagatcccagttctacaaaatataaaaataaaattagccagatgctgtggcttgtgcctatattcccagctacatggaggctgaggcaggaggattacttgagcccagcagtttgaggctgcagggagctgtgatcgcaccactgcactccagcctgggcaacagaattagacctcaactcagacaacaaaacaaaacaaaaaatgccagccacagtacagcaaattggcttcccaggtcttaatacacaggttgaaaagccctgagaaggccaggcgcggtggctcacctgaggtcaggagttgaggccaacatggtgaaaccccatctctactaaaaatacaaaaattagccatgcctgtaatcctaactactcgggaggctgaggcagaattgcttgaacccgggaggtggaggttgcagtgagcctagatcacaccattgcactccagcctggttgacagagcgagactccgtctcaaaaaaaaaaaaaaacaaacaaaaaaagaaaagcctcgaaaagccccgaattggtggatagtaaaccacttggtgcgcccttagaatattgcccagagaactctttccatggaagttgctttatttatttatttattttttgagacagagtctcactctattgcccaggctggagtgcagtggcgtgatctcggctcactgcaacctctgcctccagggttccagcgatcctcctgcctcagcctcccaagtagttgggattacaggcgtaggccaccatgcccagttaatttttgtattttagtagagacgaggttttaccatgtcgcgcaggctggtctcaaacttctgacctcaagcgatccgcccatctcggcctctcaaagtgctgggattacaggtgtgaaccatggcgcttggcctgaagcatcccctactttgtaaactgttgagtctctgcacctctgcagctccctgccccctgatactgggtaccctgtgcccactctgtgctctgctggcgcttggggcaacacccacctttcttcttgtccggggcctctcgctcagcaggccgcccacccccagacaggcggaaggagccctcgcgggcgaagctggtgcggctggcatcgaaggcggccgtgaccccacattccttctcccgtcgctgttttcgctccaggcaggcggcaaaagcacagcccacagcgtggctcagcctctcgccctatggggagaggatgggcgggggggttagaggcgctgggcagtgcggacaggggccaggggcactgggttatagccgctaggtactgggttgccccggatgagtctctgcacttctctgggcctcagtgctcatctgcaccacaaggaagggctggaaatgacagctccaagtgagagaagccagaaaccaatgagcctgttgtgtggctccacttactggaaattccagaagaggcaaaactaatctatggttctatggtgaaaaaaagtcagaacaggccaggagtggtggctctcgcctgtaatcctagcactttgggaggctgaggcgggaggttcccttgagcccaggaggtcaaggctgcaagcagctatgatggggcaactgcactccagcttgggtgacagagtgagattctgtctaaaaaaaagtcagaatagtggtagtttcctatggggtggggaatgactggaaagtgtatgaggggatgaccgggtggtggcaatgttctagatattgataggggtttcgttacatgggtgtatgcagttgtcgaaattcgttgactgtacaccaaaggcttgtgcattgctatagactaaacgtgtgtgtctctctcagttctaacgctgaagccctcatccacaatgtgctggtatttggaggtgggcctttgagagacaataaaagttatgttagatcatgaggtggggtcctcatgatggaattaatgcccttatttatttattttttttctgggacagggtcttactctgatgctatgctggagtgcagcggcatgacctcagctcactgcaacctccacctcccggcttcaagcgattctcctgcctcagcctctcaagtagctgggattataggcatgcgccaccacacctggttaatttgtgtatttttagtagagatgggatttcatgatgttggtgaggctggactcgaactcctgacctcgagtgatctgcccacctgggcctcccaaagtgttggggttacaggcgtgagccaccatgcccggccgggattaatgcccttaaaaaggaaaaagagacaagagatctcccctccaccttgagaggtgaagatacagaaagcaggcatccatctgcaaaccaggaaaagagccctcaccaagaaatgagccatttgacaccctgacctcaggtatccagcctctagaactgcggcaaacaaatgtttgtcatttaagccacacagtctacactatctggttatagcagcctgaactaagacaatcatatctttcgctttgaagaaaaaaaaaatctggaaacaaatacgaattctacttaatggtgtgcatgctgaagtagtccaatgcctacaaatttgacatacaaaaagaatcagacggtgtgactgcagtcgctcacacctgtaatcccaggaggccgaggcaggcaaatcacttgaggccaggagttcgagaccagcctggccaacatggtgaaaccccatctctactaaaaatacaaaaatctgccaggtgtggtggcgtgcacctgtaatcccagctactagggaggctgtggcaggagaatcacttgaaggttggaggcggaggtttcagtgagccaagatcgtgccactgtactccagcctggggcaacagagcgagactccgtctcaaaaaaaggaatgaaccactgatacaagcagctcacgcctgtaatccgagcactttgggaggccaaggtgactggatcgcttgagtccaggagttcgagaccagcctgggcaacatggcgaaatcccatctctacaaaaaattagccaggcatggtggcgtgtgcctgtagtcctagctactcaggaagctgaggtgggagaatcgcttgaacccaggttgcagtgaggcgagattgcaccactgcacaccagccttgatgacagagagagacgctgtgtcattaaataaattaattaaaaacattgccgggcagggtggctcacacctataatcccagcactttgggaggcagaggcaggcggatcacctgaggtcgggagttcaagaccaacctgacctgcatggagaaaccccatctctactaaaaatataaaattagccagctgtgatggtgcatgtctgtaatcccagctacttgggagactgagacaggagaattgcttgaacccgggaggcagaggttgcagtgagctgagattgctccattgcactccagcctgggtaacaagagcgaaactctgtttcaaaaacaaacaaaaacacaacattacactaagtaaagaagccagacacatattatatgattccattaaatgaaatatccagaataggtaaatccacagagagacaaagcagattagtggttgccagggggctggggtagtggggagacggggtgaattgatgaatggagatggggtctcctttagcggtgatgaaaatgtttcaggactgctaaagtcaatggttaaacaacactgaaaatgtattaaatgccattgaattgtacacttttaaatgattaattttatgtgaatttcacctcaagaaaaaaaaaaagttgaacttggggaattctactgcttaatggttaaaacttccttcagaagtaggaaggaattcatccaacatcacattctttacccacaggagatggtcctgctcttttctggctttcattctcatccccaaatagttttttttttttgttttcttgagacagagtctcgctctgtcacccaggctggagtgcagtggtgcagtcttggctcactgcaacctccgtctccagggttcatgtgattctccccacatgtgattctcctacctcagcctctggagtagctgggatcacaggcgcctgccaccatgcctgtctactttttttgtatttttagtagagatggggttttaccaggttggccaggctggtctcaaattcctgacctcaggtgatctgcctgccttggcctcccaaagtgttgggattacaggcgtgagccaccacgcctggccaatactcttttttttttgagatggagtctcactctgtctcccaggctggagtgcagtggtgcaattttggctcactgcaacctccacctcccgggctcaagtgattctcctgcctcagcctcccaagtagctgggactacaggtgtgcaccaccacacctagctaattttttgtatttcagtagagatggggttttaccatgttgtccagggtggtcttgaactcctgagctcaggcaatccccccgccccagcatcccaaagtgctgggattacaggtgtgagccactgcacccggccctcacgtgaatactctaaattgggaaccgtgagtatactttcttctccagatgaggaaactgggcacacagaggttagtgatgtgcctgaatgcaggaagcttgtaggggtggggctgggatgccagggcatgggagggaagagttggccagctgtggcaatactcacggagtccttcagtgccagaaaacagtggcagatccagcggcgggtagtcccgtcacgacagatataggagaaagccttgtccaggttgcggtcaggagcacaaaaggagaccttttcgatggtctggtcgaccagaagatcctaggaggggccggggaggccaggagaagagtgtgaactctctttcaagtgttcactcaacattctctctgtgtctgctgaaatccagtcctgaacagggtggggacccagcagtcactgagacaccctgtgccttgcctgcagagggctcccaggtcagcgggaagatcagacccatcacgagatgggcagcccagagtcatagccaggatgtgatgaaggaggcccaggcagaggggtcagggccaggaccatggaggcacaggcagaggggtcagggccagcatggcagaagccagcttggggtcagtcaggcaaggcttcctggagcaggtactaactaagaaaaaaagtcaaggaacagtattttgggctgagggaactgccttgcaaaggtggtgatcttgttctgttattaacccaactctcagcatgtcctgggcacctcctagggcagtctctgggctgggggcagcagattcaaggtgagcaaacagatacctagattgtggcctcatagtgcttccttctgactgggcagggtgacaataaacacttaatggctaacattcattgatctgagcagttacgatgtactagaccccatttaaatatatatatatatttttttcccagaaggagtcttgctctgtcacccaggctagagtgcagtggcatgatcttggcttactgaaacctctgcctcctgggttcaagtgattctcctacctaagcctcccaagtagctgggattacaggcacgcaccaccacgtctggctaatttttgtatttttagtagaggtggggtttcaccatcttggccaggctagtctcgaactcgtgacctcaggtgatccaactgccctggcctcccaaagtgctgggattacaggcgtgagccaccgtgcccagcccacatttaaatttttttaaaaattattttgtatagatggagccttgctatgtttcacaggctgatcttgaactcctggcttcaaggggccctcccagccaggcaccatttcaaataacttgcatatgctttctcacttaatggtagggtctattataatccctgtttttctgcgatggagtttagctcttgttgcccaggctggagtgcaatggcatgatctccgctcaccgcaacctccaagtctcgggttcaagagattctcctgcctcagcctcccaagtagctaggattacaggtacacaccaccatgtccagctaatttttgtatttttagtgagatgaggtttcaccatattgccaggctggtctcgaactcctgacctcaggtaatctaccctccttggcctcccaaagtactgggattacaggcgtgagccaccactcccggcctataatctgcatttttcagatgacacaactgagactcagagaggttaaatctcatgcccagggtccctaagctgggatcggagctgaggcagctgctccagtctctctcacccacagcctatgccagttcccaaataatcacagcatttattcctgagttatgacgacagagggagcacacggcatcgtctagaaggtccctgagggagggatgtgcagaggaggcgggaaggtgtcctccgccctgattccagcagggtgagcagacaggccccctggcgtccacccccacaggcctcctaccttggttttgtcgtccaccactcggagcccatcggctgacacccacaggacagacttcacggactttcggcccatctggagggaggcaaggggacaaaggagccgggtcagggtgcctctccctgtctgaccttgccccctccctcatggcagccccctcactcaccgccttcagcttcttcaccgcatcttcacacacgtgcattccccgggactcctctacctccacgtgacccaggtacttgggttggagggaatggggggggggacatgaaacagcacagtaatcactcattctcagtgtccactgagcatctgccatgcagtagacaatattttaagcacatgatgtgtatgcaatcatttattctgcatctcaactctacaaggtggagaccccattcctggtctagacatgcagatggggaaactgaagcacagcacgtagtagtgattccagtctagctatacccctgggccctaacccggcaccgtggtcctcccgagagctagtatttgcatctctgtgcgtgaggactggccacaggccatgcaaagctgctttgcctaccctaaagcagctagaaagagcctgggccagtccccacaatgactgaagggagttagggtacctgagccccagctccctcatctgcaggtgggatgactgttgcctcgagtttcccaggggaaagctcagttgcacactgctgcagttttaataacacaccctttactggctgccttactttcctcactcccaacaccatttcctgcacctcccaaatgaagccgtcacattcaaagtctgcttccagggaagggaacgtaaggtggtggaggggctgtgaccatggtcagtcatcacccagccaggaaggggctgagctccacagtccacgccgtgaatcctgctctccccctcacaggaatgtaaaagcgtagggtatggctaaaccagaacgtccttatcggtagagcgctttgcaaatgctacaccacatgacggcttccaggtaatagtttgctggtacaaaaaaatgtgttctggttttttgtttgttttcaagattgggtatcactctgttgcctaggctggagtgcaatggcacaattaaggctcactgcagcctcgaccttcctggactcgagtgagcctcccacctcagccttgtgagtagctgggactacaggtgcgtgccactgtgcctattttttgtagagacagggtctccctgtgtttgcccaggctggtcttgaactccttgactcaagcaatcctcccaccacagcctcccagtgtgctggaattacaggtgttagccaccactacgcttcaagtttttttttttttttttttgaaacagagtctgctctgtcgcccaggctggagtgcaatggcgctatctcggctcactgcaatctccgcctcccgggttcaagcgattctcctgtctcagcctccccagtagctgggactacaggcgcccgccaccacgcgaggctaatttgttgtatttctagtagagccggggtttcaccgtgatagccaggactgccggcctcacgctttttaacaccaacttcaaacgacttgggctggtgtcccagccaggccgcgcacccgcacagcacagcacagcggcccccgtccccctcgccccgccgcaccctgccgcgcccactcaccctgaccgggaagctgcacgtgcccttccgcaccgcgtcctcgtctgcctgccactggtgcgggcgcgacgcctcgggcacgtaggctggcttcctccgccgcaggctctgccgtaacttgttcatggtgcccgccccgtctggtgacacaggacagtgatgtgggtcaagggtgggggtcagaaggtatggagctcaacggggagggaccagtgctcagggagcatggggtcagataacaagataactggaagcggggttacagggtcagttggcagcgcacatgggatcagcagctcaagtcaggggacagtgaggaaaggagccaacagaagccaggggagtgcgaaagttgggcactggggattcagaaccatggggctaaggggctggaggtctggggtggggggtatggggcacaggcttcagggcattggagggcttcttgtccatgtggtggatgcttcctcattcccagggccgtgaggacacaaagggtgggaaatcagacgtaggagggcatgggggctagagggcatagaagtcaggggccgcacggtcaggggttttaggggtatgagagtcaggcagtggggtgatcagagggcagcagaggagttgggaattgcatgggtcaggggtgcaggagtcaggtgcatggggtatgggggatggtggcttgtctctggaactctgagacacagccattctgtgacaactgtgtctagtccccaggcaaggcttctggggccttgcactgatgactgtcagaggcagggctgtgggtgtgtggagtgggtgtggaggtggccagccactaggacagtcttcactgatcagccatcctgacagtcccaggactgggagcaccaacagcagagggggatgtgtgtgtgtgtgtgtgtgtaagcaagtgtgcaatggtatgttctggaacgctgtctatgaggggctctatatctgagcaggcaagtaatgtctgtgagtgtgtttctgaaggctgtctggaagaacgcatgtctgagaatggtgtaggatagtgtgcatctgtgaatgctgtccgtgagggatgcatccaaaagtgtggttgttgtctgtgagtctgaggccctgaaggttgttgctgaagggcatcgatgtctgagagtggttgtgagtgtgtgtctgctgtctatatccgagagtgccgttgttgtctatgagaacttgtggctcagtgcctgttgcctgtgagggtgtgtctgtgtttgagatgaggctgtcgtctttcaaagggtgtgtccatggctgttatccatgtagctatgtctctgtgtgaaggtgtggctattgtctgtgatgacattgcctcggagagtgcatctgagggatctacaagactgtctgtgtccaagagtgcagctgttggcggtgagcctgtgtgactgtggctgttgccttagagtgtgggtgtgtgggtattgcacagagggtgtatctgtgtgcagtggtgcatccgttagggtgtgtgggaacatgaggttgtctttgagagtgttttcatgagggttatttgtaagggtgtgactgttgcctgagagagtgctgggtgttctttgtgagactgtgtgcatgtttgtacacaaccgtagctccctgtgagagcctgggcccgcgggtgctgtctgtgaaagtgtggctgtcgtctgtagaaatgtgggtctgtgtgtgttgtcagactgtgcaagagtgtgtctcttttttttttttttgagacgaaattttgctcttgttgcgaatgaaggctggagtgcaatggcatgatctcagctcacagcaacctctgcctcccaggttcaagcgattctcctgcctcagcctcccaagtagctgggattacaggcatgtgccaccacccctggctaattttgtatttttagtacagacagagtttctccatgttggtcaggctggtctcgaactcctgacctcctgacctcaggtgatcctcccgcctcagcctcccaaagtgctgggattataggcattgagccaccacgcccggccaagagtgtgtctcttgagagtgtgtatctcagagtctgtatccagcgagcgtctgtggtcacctgtgaatctgggtgttgtctaggaatgtgtgtgtgtgtatatatgtgtgtacattagtgtgatgaacatctacttcagcatgtgttcaagtgtgtcactgcattagcaagtgtgtgtgatctgaaagagatctgtgtgtgtgtgtgtgtctctaaccgtatatctacagatgtgagtgtttgtgactctgcacttgaggctgtaagggtgtcagggtgtgggtctgtgcatgagtggggctctgacagtcgctgaggaagatgcctgagggtgtccactcatgagtgtgattaagcctgtgtgaccgcagggacagctcctctggtcgtgttaggcaagaccacatacccattcagccctgccctgtcccaggctggtcgctcacctggctccgtcctgcaggtttctgggggccccggggccccacagggggctgggggcaggtgccgctcaggcctccggggtccgccctgcccgagtaggggaggagaaggtgagaagtttgtctgggttggggctcagtctgatacttcaccccgactttggacttcggccagccccctccatcttgggctccctgatgagagtcctagttgtcctagcaactgttaccagggagatcagccacctggttccaagggcccaggaaggagtaggtatgtttggggggcatatgttggggatgtgctggcctcaggagagcctcactgcccaaggggatgctgtgagagtggccttgccctccagatgcatgtgcagggctacacacatacgcagccaactcatatctacaggtgtccctagcatctggccacagctttacacacttggttacacatagacgcaatcacagctacacacctcagatcgcagatacacagaaacagtcccaaacccagaaagctgccactgtaaacatctggccgcatattcatgttcggacacacacagtctctactacagacatttgtccacatacatgcagcatgtcctggcccactcagttcccaccgcagacacctggtcacaccacccactgaaatttggtcacttccacattctcagccacatacaaagaacggggcccagacaacccactagagccgcacatgcgtggccacacccagtgacagctatgtttcctcaggcacccgcccaagatactgacgtcacaggcccacccagatagaatcacacccagagttcacccatttgctgacccagtcccacacgacacaatcgcagctatatacacttgttacacgtatctccactgctgcacactgacatctggtcacagatgcacacggacagacacacatttggtcccacggagaccacatgcagcctcaaccagaccagtcacaccaacacactgtttttggccacacactgtcacgtggtcacacatactcagtcataggtgctcaaatctggtcacagcatcagtcacacagtctattgtgacagccacactcatagggacagtcctctatacacaaccacatacagaggtactgatggccacagcatgcaaccacccacaaacaactgtccccaaggatggcctccctcaagacacagccatggtggtcctataggcatggccacagcatcaatgtccatgtgacccagccacctatcatggtcataatcccgtcacccagtgtccatacacagctgtaccatgtcactccaatgcagcgaaacatatagcctttcttcatgcaggcacacaagtcacacagacaagtatgtggccatatagaatcacagccccgtgtggacaggtgcacaaagtcacaagccccacctacacacatatctcacacatagagacataagcacacagttttagtttcccatgtcacaagtacacagtccagtgtatgcacataaatgcagtgaccaggatgtggcatttatagctgggtttacacagaagacacaggtcctgacggagccatgtgcacagtcaggggccaatctcatcaccaaatcacacattctaacacaggtagtccagcacatacacacagagacaaaaacaggcacacagctacagaccccacactctcacagatgatgacatagacacagacatctatagtcacccagggtcagacatgcaggtcaaacacaataatatggaagccataatcatatacacacccctacaaacataatttcctggcaccagcacggagacacatccacagctttagtcacacacaaataatccctctaaatagccagggtttcagacaccaagtcaaatacataacccaaatcacacatgcaaggctagaaatacacacaatcactcgttatcacacacactgctagatacagtcatttatattaatacaacctcagtcacacactcagacatggttctgcatacgcaaccactgtcatacacaatactgtcacacaaccccagtcacacagatacaatgtgacttcagacacaatggcagtcacacaggcagagttgcacagacaggtgtgtgtcactcacgtatataaaatcaggtagagacacaactataaacattgtcagtcactgggagggtcacacatgcacatggagccatagacaactccactcacacacagtcacaactccacccacgtcctgtcagtcacacgcatgcccacccccagactcaacacatactgtcacatacccagttatagttaccgaggcatacaaacacagggtcacaaaagacacaatcacagacaaccacagtcacaaccatgcacacctccaaacacagacagactaaaaagtacaggattctgcacagtgagcagctgtcacacacacatacacagtcacacagatactagggtcacagacacaatcatagacaccaccacaagcacacacacacgacacaggattcctcagtcaccagctgcagcgtacgcgtgcacacacacacacacatacacagccacagtcacacaaacacagggcacactcctagccacctccccatcgcttgcttccccccttccccccaggtaccacacacaaagccgccgtcaccgtcaccgcagacactgcagacagacagggctgcacccggtccctggggagccgcccccagcccagcctgtatcctggagcctgagggccaggtccaggagggggaagcggtgcattgtctgcgggtggggccactcttggacagctgggcagccctggggacaaagggggtggcctagggatcctgtgccctgggacccatgaccaagccagggggtggagggattgggggttgcctgaaattgtccttattttattcaggctggggtggggtggagtcccaggcacagggaccttgttttgagaagtggctgtgcctgggactccgcccaaggattggggggatgctgtgcccagggtgcctctgagacctgggggcaggctgtgcttggagtccccctaggccttggcgtggtgggaacgctgtacccagtgaccccatcctcgagaccgtacctaggcagttgttgtgctgagacccccttaggcagggagaggtagggattgtgtctggaatcgcgtcctggaggccttggtttgatacgggggctgtgtccccgaccccatctccatccccatctagttctaggagttgtacctagaatctctgtacccctgtccttggttttgtggggggtctgtgtccaggatccctatttccagggccttggcaagagatggcccaggggtctgtgcccaagaccccggtctcctgggctttggcttgttgggcctgttcctggacccccacccgggaccaccctctccagccttggcaccctctctccatccgggcgccgcggccgcctcccaccctccgccacatcagcagcggcgccgcccccgacccgagcccccctctcccgcccttctcacgctggccgccgcgctgcgggacatccagggcccgggcgcccccgcctcccgcggccctggctgggcctggctccccgactgctgctgctgcggtggtggcggcggcagctcggtctgacgccggccagggcccggggccgggggatggtgcgggatgcacgcgcgcgagcctcctcggctcccgggaggattccgttccgggggcgggggagcgtccctcggcctcggctccccgccccgaccccgcccattggcccgccgcctgccgtatatgcagaaaggtcccgccccgccccgccccttggcctgaagaccccgcccacacgcagacaccatcccgccttccccggcgcggccaccgccccgccacgcccattggccagtcccgagctgagcatgcctatgaacatcgccgagtcctttcccccggtccgtcctggcctgggctccctttccctccgtgacacctgacctcagatcccctccagctccgcgtccgaaagagttgcttctagaggcgccttgccgccccacacccccaaatcttcccgctaaccccatggttccccagcccggcgggggcgggcaggagcggtgacgaggcactttttgcaaggaaggggagggggtgtgaacagaccaaggcgtcctgatgcgcgatcggttcggctttgggaacgggggcgccggggtgggaccagggcgcggttctggccgctacggcgcccccgccgccccctacgccaatcctgtgggtttggcaaagcagctggcagggacattagagcccattagtaaaggcgaggttgccaggagtgaggggagggagcccgcagccaagaggcactgtgtgtgtgggaggcctcagctgccacagcccttagagcaggtggtcagcacgtgggggggggtggggaaggcgagaaggaggttcccggcaacagatggcacaggcagggctgaggctttcagacaagggggtgcaggggggctggccatctgcacctggaggccgctggcgagctcctccccctctccccccaaccctagcgcagagaaaagagctgggggaaggggagggctgcttttattccgattgaagattcagctcccccccaccccgcacccctacctctccaacacactgagaggctggaacccgggagaaggcagctgttggaggagcgagggaggcagaggtgaggactgcctccaggaccatctcgccttccacgggaggcttgaggcagaggtgagggctccccctgatgagtctgatctgcataacgacatgcagcggcccaaggctccctcaaatgttggcaaagataagttaaccgcttccctggcttagttttcggatacccactttcgagtggggaggtgcaggatctagggcacgaagttgggagttccccagccccagggatcctgagctcctgggccaaggaggagagccaggcaagactgggaagcccaagggggctcctctgacccagggcagacggggaagggataagaggcactacagcagggtacggcctgctctggggactgaatcccccatggaggctgtcatgagggatccacccaggagtcccctttggtggggaggctgccggcagtggctgcgtctggctggcgactggcccagtagcggtggtaggtgtcctggaagaggtccctgcaggcgatgtgggctcggaggtgggcacaggccaggaaagcccctgccagcttgcggtgcagggcataggtctcctcgggtgggggacacagccggtgccgcagcagcaccgggatgaggtcctgtatgcggcgggccgtttcccccgacccaaagtcataagggccctgggtggcgaaaggctcccccaggatcatcactgcctccacgtgggcgtcggagaatgcctgggagtgggggtggggggagagcaaaggcagccagtgtggacatagagccctctgcataacccagaaacaacgtgtagcctccactccctccagtctccaccatcaacacaagccccgactcccccaagagtgagcagcttccactccttccagagcctggactagacaagcagctgcctattccccgagtaagcaccccttacttccctgcagagcctccaacagacaagtagccctctactctctctacaacagagaagcggccttcgcccctcctgaacagatccacggtgcccatgttcccagggttcctgagaagtcaggcagccacctccccccactcctccccaaagcccccagcatggataagcatccctcctagagtcacccactccccaggtatagacacacagcctccattctccctagtggagacaagcccctcctagagtcccccagtccccgggtatcgacatgccccatcacctactcgagttcctcagtggagataagcagccccccactgcaccccaccaacagacaccagcccctttctcccccagtgtctccccaccttggtttcaaagcctgtgaggaatttgaggtccctggacttctgcaggacacagtctctgtctccatcagctgcagccttcaccacctggggagacgggtgggagttagagggacaaaggccggggctcaagggggctctggagaagaggagctggaagcctgggcctcccatgtacccacctccattctcatctgcctgggccctccctcacctggaagcttcctgctcccaactttgcctgtctgtgactcccttaaagactcttccagagcctgggagtggaggtggttagggatcctgcccacctagagggcaatgtggggcctgcccgggaactgccacagtgaaacagtgcaagaaacaagtgtcagggctgctggtgagtccaaacactcaactggacgggtatgagcgtgacccagaactgcatccaaagttgccaggggccatctctctgtctcccacactggactttgagccccgtgagagcaaggatcccagttgggtttagtcgcacggggcacagggtctggtgctgaggaggccctgggtgaaccttgctttagcaaatgagcgtgtggagcagagcagctctccagccatgagctcacacacacagggcaggagttgtgggcatggagagatgcccagctggggccagctggctagggttccgtcccagctctgccacctgccggcctgttgggcctccactttctcatctgtgaagtggggatgccaaaagtgccttcctcatggggctgttgggaggataaagaaggtgatgcctgtggcctgcctggcgctgtgtctcatgcaggaagcaccgtaaatactataatctaccattattaagaggtgggcacgggggtccctatttcacagaaggggaagcagacccggagtagggagtggaaccgggtcacaccactcactactgggttgcccttttttgtgaggagggggattcgggattaattccattccctctctgctccccctgcccgagcatgtctggccatctgtcaggcctgtggtcctcagaagccagggcttttataaagtggcaaaggctgcaggcctgggtgggaggggagggtgtcagtggggagaagaagggtctcagctttgtgcctcagtggccggcagagagggccccaaggggcctgtgtgtaaggggttatcacctcctcttcctgttcctgtctcagaggtggccccaccagtccccagaccagacccctagacacctctgtccccaacttctagcccgtctgctcccatggactgccagctgggcatctcccagccacccctctgcccctctccacagctgccctgagctcccacccccaggcttagagaccacttcttattcagagggagttttcaaattctgactgcatcccttccctgctcaaatcttttccacggctccgcagggcacctggatacagtacgagctgtagagcgcagcctctaaaatccgcagtgatttgctgcagcctcgtcactgtgctgccccccgacctgccctcccactcagaatgggagcttcctttgggtgctctagggccttactactaccagtgtggtccccatacgggtagccctggcctcacatgggtgcgtgtcagaacatagcatcttacacccacctccagaccagaatctgcacttgcacaggatcaccaggcttcacatgcacatccaagtctgagaaatgctgctctaatgggactgtcccttatcactgcctcgtcttggcacatgttgtctatctgaaataccctccgagccttttcccagttggcccccctcatccctcaggtctcaatgctgacactccctcctccgggaagccctccttggctccccaggctggctcaggctcctcctctgggctcacagtgccctgcgcttcccccatcccagccctgtccatgctaggtcctcactgtcgcctcactgactatgagttctgtgaggaggggcctaggctgggcccaggtcactgctgtgtctccagctttgcctagaatagagctgggcacagaggaggggtcagaaaacatttagattggctgggcaggagggctcatgcctgtaatcccagcactttgggaggccaaggcaggaggatcacctgaggtcagcagttcgagaccagcctgggcaacatggtgaaaccccatctctactaaaaatacaaaaattagccgggcgtggtggcacatgcctgtaatcccagctactcgagaagctgaggcaggagaatcgcttgaacccaggaggtggaggttgtggtgagccaagatcgagccactgcactccagcctgggcgacagagcaagactctgtctcaattaaaaaaaaaaaaaagaaaagaaaaaaaaggaaaagaaaacgtttagattgatggctacatgattagaggacccagggcaaatgtccaatctcaacaacgaatgaaatggtattctctgcagcctctaagacaaactgaccccagtgggtgggagagacgagccaagtacgtgaggaaacacctcctgtagacagagttgcccccagggacacacacctgggctggacaccagggccctggacagcatggggtctggagaggtgacaagatggtcactgtgggcctttctcttaggagggagctgggcagtggttggaagcttgggctctggacctggaccacctgaatttgaatcccaagtctgctgtgatcttgggcacgtgacttaacccctccaggacccagttacttcatctggcctaaaacgggcctaaaaacggtccttttcgcattgtgttgctgtgtggtttatatcggttcctatacgtaagcactaaagatggagcctgacatattaagtgcttggtgtgtgctagttgctacgagtattactattatttattatttcttaattccagaaactgcatttcgccttcttactcctctgcctcagtatatggcttgagcctcagcctttcagaggccctggggtctgggggagactcacctcgatgtaatggtctgtgaactctgtcccaaactcccggcttgcaccaaagtccagcagggtcacctggaagcaaggaatggtgaaaggaatgctgggatcccattcacaccctcactgtctattggggcagccaggatctgtctccctccccatgaccctgcctgctcctgccagagtccctgcctggctgcctcactgggctcctggcctcatctcccgtttccaaccgaccccctagctgaaggcttttttttcttttagttctaattgtttatgcaataacaaattttagacccagaaaaaaaatccagagaataataaaagatatagaaaagtaaaatgaatactcacaaatcctgccacccagcctaaaatataaaatactccccatccggccacacgtggtggctcacacctctaaccctagcactttgggaggccaaggtgggtggatcatgaggtcaggagtttgagaccagcctggccatcatggtgaaatcccgtctctactaaaaatacaaaaattagccaggtgcggtggtgcgtgcctgtaatcccagctacttgggaggctgaggcaggagaatggcttgaacctgggaggtggaggttgcagtgagccgagattgtgctattgtactccagcctgggcaacagagtgagactccgtctcaaaaaaaaaaaaaaatactccccatccacgtggagcctcctgtgtatcccgccctgatcacacctcccccaggtccccagggtcacctctttcctacaatcattattaaattatttcctgaaattctcatttatgcatttctatattttctatgtatgtgtacagctgtaaacaatctagagtaatggtgtgcatattttcaaacttcacagaagtggtatttactgtcgttctcctgcaacttgtgctttttgcccagcatggttttgcgatttatccctgttgccatgtgtcgctccagctcagtcactcatttcacactgctgtgtaaggacttcgttgcgtgaatctatcacagtgcatttatctggctgaggaatactgtggttgtttctgattttttttccttctttttaaatatgtttattagttataaactctgttctgacatttttttttttttttgagacagggtcttgatctgttgcccaggctggagtgcagtggcacgaccatggcttactacagcctcaaactcccacgctcaagtgatcctcccgcctcagcctcctgggtagctgggaccacaggtgcaccccaccacacctggctaagtttgaaacattttttgtagagatagggtttcactacgttgcccagactggtctcgaactactgggctccagtgatcctcccacctcagcctcccaaagtgcagagattacattagtgagtcatctcacctggcctgtttctaatttttgtgctcaatgaacacctgtaagaatgtttctagggcagtagagtttgaactgaccacaacccacagtaagaaattgtttctactggtggctgggcgtgatggctcacacctgtaatcccagcattttgggaggctgaggggggcggatcacctgaggtcaggagttcaagatcagactggccaacatggtgaaaccccacctatactaaaaatacaaaattagctgggtgtggtggcgcacgcctgtagtcccagctagttgggaggctgaggcaggagaatcacttgaacccaggaggtggaggttgcagtgagtcgagattgtgccactgcactccagcctccattctcaacaagagcaaaactctatctctaaacaaacaaataaataaaattatatatatatatatatatatatatatatagagagagagagagagagagagagagtttctactgggcgttcatgcaaatgcacacaaaaacgtcaaacaaaagtgtcccaaggccaggcgcaatggctcatggctgtaatcccagcacttcgggaggccaaggcaggcggatcacctgaggtcaggagttcgagaccagcctggccaacatggtgaaaccccatctctactaaaaatacaaaaattagctgggcgtggtggcaggcacctgtaatcccagctacttgggaggctgaggcaggagaattgcttgaacctgggaggcggagggtgcagtgagccgagatcacaccattgcactccagcctgggtgacaagagcgagacttcatctcggggaaaaaaaagaaaagtgtcccaaaataatatggatccctcccatctgtgacatactgacatcatctattccataaaaaaaaaaaaagtgctggtggatcatgaggtcaggagttcaagactagcctggccaaaatggtgaaacctcatctctactaaagatacaaaaaattagccaggtgtggtggcgggcacctgtaatcccagctacttgggaggctgaggtgggagaatttctcgaaccccagaggcagaggcttcagtgagctgagatcgtgccattgcactccagcctgggcaacaagagcaaaactctgtctcaaaaaaaaaaaaaagtcctgttggaaaccaataaattgatgtcaggactcctatcacttggagttgggtaaacatatccctggggtatgaacctaggaggggacacagggtgtatgcacattgtggagaaagaagaggcaagggactagggctggagactccgtggggccacaggatgctcagcaaagggttcagacttgattctgagggggctgtgaagctgtaggagggatatcttgaccagatttgtgctttagaaagacccctctggggacaaaatggggatagaccactttggaaaacagttggcaacccctgataaaggtaatgatgtatccaccaacactcaagtctgcaggtccaaaccttcactacaggtctttgtacaccccctgccctctgctgggaacactctgctctctggatggttgtctccttttcccctgtcccatctcagccttttttttttttttaaatagagcccaggctggttttaaattcctggcctcaagggatcctcctgcctcagcatcccaaagtgctggaattacaggcatgagccaccatgctcagcctctggtctcagctttttttttttttctttggtgagacagagtctcgccctgtcacccaggttggagtgcagtggcatgatcttggttcgctgcagcctcgacctcctgggctcaagccatcctcccacctcagcctctcagtggcctcagctttaatggcacttgctttaagaagcctcccttaatccctgctcaccccacagtgagtcaggcactttccctgggatcccataacttcctgtgcctcccccaactccagcccccacccctctgcctgtgcctcccccatcccggtcctgacccatctggcctgtgctcctcattgtggttggtacgaaccactctaggtcatcgctgtgtggtgccaggtccccccactggactgggcactctgagaaggcaagggtcagggatgtctttttattgctgtcaagaggcaagggcaggtgatggtgtgttctgtatggatgacgagtgtggtagtgatggctaactgccttccaaaagctgtacttcccctctgtgctgtcacattgccaccaggaaccactgcctagccagggactccattttccagcatgccttgcacctaggcaggctatgtcactagctctcactgatggaatggcaacggaagtgctatgtccattgccccaggatgagcttagtgtatttagcctgggcattactttttccacttctggccaaagcagttaggcagggggctaccctcaacctctcttaccctttccttgggaagcagagcgttgcaaggccccagggatggcaaaaccacaaaagggaaggagctgggtccctgaatcccacttggaaaagggccacccctgcctattgtgggggtaatcaactgctattttgttgagctaccgaaatatcaaggaatatttgttacaacagcaaatgtacccagacacacatcactaggaaccaacctggtggctggaggcatcatacaggaagttggcccagttggggtcagtctgcatgaatcggaactcaaacagctcccgcagacacagcgtcaggagctggaagcaaatctggggtggggagaattaacaggcatctcagtgtgatctcccttgtggtgccactgctggcctggagagagaccatgagcctggcccacccgccctggggccatgcccttcccactgtgccaccagacagcatacctggttccgcaggtcctggcttaggccctggcactggtccagggggacccctccagccagctccatgcccagcacccgtgtcgtgcacagctccttaaccacggctgggacccggaagaaggggtcatttgccagcagctgcctggggcagaaggaaagggaggaaggggacttcgtgcttcaggcttgtgacccagcttgagacctcctccttgtgctctcagaagtcctccatgaacagtctgcgccatgccctccctcctgcccatctcttgctgctgtctgccctgggtgatgaccaacacctggctggactgagatttaacaagtatctccaaggtgcctactctgcacctgcctctcaactgggtgctgctggaaacccagtcaccacttccctacccgaaacccttctatgacttctggttgccccagaaggatgagttcaggtgtatttcagcctttgcattactttttcattaatttattaattcattcatcccaaaagtagtcactggtatcaaaatctgtgaagtctatagtgatacccatgggtcagtccttgcaatcactactctgaacacaggtaaatagcgggaaagaatcttctgtgtccatccttgtgctaaatgatgctggggacagagcagtgaatgaaccagtccctggacctggcccccaaccccgagaccacactctcacaaacagacggattatagattgaggtaagtgtgttggctgggtgcagtggcttacacctgtaatcccagcagtttgagacaccgaggtgggagaatcgcttgagcccaggagttcaagaccagcctgggcaacatggtgaaacctcgtctttatgaaaaactacaaaaattagctgggcgtggtggcctgcgcctatgttcccagctactcaggaggctgaggtgggaaaatcacttgagcctgggaggtcgaggctggagtgagctgtgatctcaccactgtattccagcctggaaaacagagcgagaccctgtctcaaaaaaataaaagaagtatgtctatgtaagatttgggaggcagagaatatgagcaaggtctctggttgaggatccgtgggatggctggaggagagtgagggagaacaggagggtggtgtggggttttatcctaagggcacccgggaatcctgtgggggacgggggggtctctggcccatcaccccacttcacactctcttccttgagctcctcctttggggtttgtatttttgtccttgttgataaaaatctctgatgtttgaactgctcctcatgaaccggagccatgtggggcatttaatcggcacactcccctttcatcctcactccacagtgaggggatgctctctggaggccactgtacagattgtatggatgcaggccacgtaacctgttaagggctgacccaggatttcatcccgcatctgagtctagggtgtgtgcctctaaccactgccttctactgagctttcactctctgtctacagagcttggcacgttttaggctgtcaataaatgtgtgagccacactgtggaggaccccactgaggtgccattaattgctacacatcaggatgcttccaagatataaccacattgttccacgtagccatagttcatgcattttcactgctacgtaatattccacagatgaatataccgttgcttatttgtccaccctgctggataaacttgatggatatgggttgtttccagtttggggctgttgcagacaagcgttctagaacagtctgatgatggatactggcaaaagggtccctagagtgttcagcagggagggcaatcgttggcttgcagagttcttgaatataagggcttatgtgatgatgccaacctgttctcaaaatgcttctaccaccttctcccacaacctgcagtgcagaagggatgctgtggagcccactctctctacctcccagtgctgtgggctccttgctctccgtcagtccagcagaggtaagagtgtgtcattgtgtaattaattaagtgcctgtgtcggaccacagtggatatgcggcccatctgacacaggagaagactgccgcttgggaagtgacctgcccaagctcacagaggacaaagggggtaagcgaagtgatggatgagtggaaggatggatgaacaatgattgaaagaaagagagagtttgccctaccccacagctccagctgccagaagctgagggggcagctacttcccacccagcctgggagggagggaaggagggaagctcagggcactcagctcacctgaaattctgggcacaagccgcctcacgacggtagtcacactcccaagccagctcctgctgcaaggcctgcaggctctgctcggcaaacaggcctgtgggggaggtgtgtcagccagggaagggccccgagcgcccactggtggatgccttctcctgccaaccctctctctcctgtctcccgcgctgtccctcacagctcctactctaggcctgtgacccacatctgtccctctcctgtctcccacgcagctcctgctcctgcctctgacctgcatctgtccctctcctgtctcccccgctgccccttgcagctcctgctccaggcctctgacctgcatcgtatcatctgtctacacatttccctcgtccttcatagcaccacagggttccccggggtcttccgaagccttttctgggctctgtctcttgcacatgcctgcaccccagtccctggcagctctttcagagtcacgcctgcctctattctgtctccttttcatactgactctcacgttgctcactgcatctgaatctcacttctgggcctggctttccctctccctctccgtctcttacacaaacacaacccaccctcctttctctaggcgcctcctcacgtgccatccccaggactgtccttttctgctctgccgcacctacaatcccgctccctgcatgcacaccctctgagagtctgctgctgtatcttggccctgggctcccgtctctctaaggctctgttaaaatccataaggcttttcccacacctgctcatgctccctgggctctccccgccttggtgtcctttctgtctctgacactcccgctcacaacgccagcacaccctgcccgtgctctcctctgggctccccctcctgctttctctctctgggcatagcccctttgggaggtcagcagaggagtgggtgggcgcctcacccgcgggcagggccgcgctcatcttgagtaccgccagcaggttctggacatcgctctgaatgctctgggctatgccggggtactgtaaagggagaagggagggagagaaggtgggagtcacttctctgggctagcagggtgcccgcccctaccctgcccagcctcccctctcacctggatcttcacggccacctccgtcccgtccctcagcaggccctggtgcacctgcccaattgaggcagcggcaaagggcacctcctccaaggaggccaccttggcctgccagtccctgccgagctcctcttcaagaactctctgcggggagtggtcacagccatcatcattgtggcagagttcattccccaggctgagtgctttacgtgttgataaccccagcactcaccacatgcagggccctgggctaagctcttggctgccaccccctttgcagatgaggaaactgaggctcagagagagctcccttgtgcaagtgactagccaggcactggcagactgtgaggctcagcctagcctgtgtcccctgaacctggactccctgggctgttgtggggattgctattatttatagttaagactcataacaatcctttttttttttttttttttgagacagggtcttgttctgtagcccaggctggagtgtagtggcactctcacggctcactgcagcatcaacctcccgagctcaagccatcctcctgcctcctgaatagctgggactacagatatgtgccactgtgcccagctaattattactgttattatgtttagtagagacaaggtctcactatgttgcccagggtggtctggaagtcctgagctcaaatgatcctcccaccgcagcctcccaaagtgctgggattacaggcatgagccattacacgtggccaaccatcctttattatgctcttatatgttattattaactcacagttactgtgatcaagaagagctaaaatttacaatgggcttcctgtgggccaggtcctattcagagtggcccagagagaggcagtacctgcctggggccgcatggcgaataagcagaacagggatgggagagcaggtgggtggcggaatcctggattccatgccttacccagttattagaacagctcatgtcctgggcacttacttggtgccaggcgccgtgccaacctattacagacacgatctcctttaattaaaaaaacagtaataatcacagctaacacctgcatgttgctcacagtgaatcaggggccgttctcagtgctcagtgtaaactgatttatgtgaccctatgatgtgggtgtggctgtcactatcgccatttcccagggaagggaactgaagcacagagaggtcaggctgctgttccctgttttaatcaccacagcaatgctaggaggtgtgtactctggtgattcccattttacagatggggaaagtgaggctcagaggcagggagtggggcagtgaagccaggaaggtcaggcaggtcagaggagatggagcctgcctccctcaccgccctcccccactgggcactcaccagcatctgccagcggggcatgaagtcggcgctctggcggacccgctcaaagatgtgctgcagctgagggctgatgaagctgttgtcttgggagacagtggaaccaggggggaagtaagcgaagaggtgaggagggaccccgtgtgagtatctgaagttggggcctgttggtgggtagggctggggtagaagggaggtcaggggtcaggagtcgagggtcatgctgtaccctggatgctgagcatctggccaaccttgagggcggcccctcgaactgtacataaggtctgcacaatccgctcggcattggcctccgacaggaaggggctggagtccagcccagaaccaccctctggggagagaacaaccattagaattataaccacaaatatcatcactgcggccaggcccggcggcccacgcctgtaatcccagcactttgggagacccaggcgggatgaacacaggagtctgagaccagtctgggcaacagtgacatcctttctctattaaaaaaaatatatatcatctgcacaccaacaggaatggctaaaacgaaatacggaggccaggcttgttggctcgcgcctataatcccaacactgggaggtcaatgcaggaggatggcttgagtcaaggagttccagaccagcctggataacaaagcaagaccctgtctctaattagctgggtgtatggtggcatgtgcctgtagtcccagctactcaggaggctgaggcaggaggattgcttgagccctggaggttgaggctgcaatgaactgtgatcgcaccattgcactccagcctgggcaaccaagcaataccctgtctcgggaaaaaaaaaaaaaaaagaaaagaaagaaagaaaaataaacataagttaaaacaaattgcaggagagtcaaagagtaactactacagtattgaatagatgagctatcactacacacaacagcccaggtgggtctcaaaaatgtaatgctgagtgaaagcagccgggtgcatgaaatcatcacccagttacactgatataaagagcaaaacaaggccaaacaaatccagggtccaggagccaagacagaggtcacccttggtgaggggagtgaccaggtggggacatgagaagggcaacgattctcgaaatgtgggccagggacccctgagggtccctgagaccattcagaggggtctgagagatcaaactatttttatcgtaacattaagatgttattttcccctttctgctctcatgcgtctaagaacattcactggagttctccagaggctccaggacatgtgaggacaccatcagactgacagctgatggaatgtgtacgtgtgtactcttgtgttttaaaaatatctctgtatttttgttgtgtttttgagacagtgtctcactctatcacccaggctggagtgcagcggcacaatcatggctcactgcaacctcctgggcccaagtgatcctcctgccttaacctcctgagtagctgggactacaggtatgcaccaccatgcttggctaatatttttactttctgtaaaaatggggcctcgctatgtcactcagactggtctcaaattcctgacctcaagggatcctcccgccccagcttcccaaagtgttgggattacaggcgtaagccaccgcacctggcctaaaaatttctcagttttaatttctaatatggtagacattgataactataatccacataaataagctctttggaggctcattctaacagttttattgagaaataattcacatactgttataattcaccatttaagttatataattcaatgattattagtatattcacagagttgtgcaagcatcaccagaatcaattttaggacagttacaccacgcaaaaaagaaacctggctgggagtgctggctcatgcctgtaatcccagcactttgggacgtcggggcgggatcacttgagttcatgagtttgagaccagcctgggcaatatggtaaaaccctgtttctacaaaaaatacaaaaattagctgggcatggtggtgcatgcctatagtcccagctactcaggaggctgaggcaggaagatcacttggacccaggaggtagaggttacagtgagccgtgatcccgccaccgcactccagcctgggtgacagagtgagaccttgtctcaaaaaaagaaaaaaaaaaaagaaaccctatacccattagcagtcactcttcatttcccccaatctccccaggccttgacaaccactaatctactttatgtccctacagattttcctattttgtacatttcatattaatggaatcattcaatatgtggtttttcagtgtgtggttgcttttacttagtgttttttttttttgaaacagtgtctcgctctgtctccaaggctggagtacaatggcatgatcttggttcactgcaacctccgcctccccggttcaagcaattctcctgccttaccccccacccaagtagctggggttacaggcacccaccaccacatccagctaattttttgtatttttagtagaatcaggatttcgccatattggacaggctggtcttgaactcctcacctcaggtgatccacctgcctcggcctgccaaagtgctgggattacaggcgtgagccaccgcaaccggcctcacttagtgttttcaagattcatctacattgcagcatgtgtcagcccttcattcctttttatggctggataatattccattgtatgcctatcacattttattcatccattcatcagttttaaaggtgtgcagggatcctgagaccaagaagtttgagagcagctattctagggtttcttactctgggtacggacaaatgtactttgtgaaaacgcaccaagccatacacttacaggtatgtgtacctgggtttatatgcaaattacatttcagctttggcaaaacatttatttttctttttttaatatgaacactttatgaatttatgtgtcatctttgcacagaggccgtgctaattttctctgtctcattccaatttttatttatatgtgatgctgaagcaagcacagcacaacaaagcaattcttaagcctttattaattttgaaggccagttgtggtggctcacagctgtaatcccagcactttaggaggccagggtaagaggatctcttgagcccagaagttcaaagctgcagtgagccatgactcaccactgcactctagcctgggtgacagcaagactctatctcttaaaataaaatttaaaataaaataaaatgttattgagctcattattgagctgttccaggcagaatcctaagtgtctttgtggattctctggctgaatgcccacaatcacacctggaagtaagaattatcaatcctttaattttcaaggtgagaaagcaagagactcaaagaggtgcagcacctatccctgggtcacatagcatggaagtggcagagtggggtgtagactcaggctggtcatacccaaaccctaatcctccacctaccctcaactttttattttgaaaaaaatatccaggctgggtgtggtggctcatgcctgtaatcccagcactttgggaggctgagcagggaggatcacttgaggctaggagttccagaccggcctgggcaacatggcaaaaccttctctctacaaaaaatacaaaaaattagccaggcgtggtggcacgtgtctataatcccagctatgcaggaggctgaggtgggaggatcacctgagcctggggaagtcaaggctgcagtgagccatgatcgtaccattgcattccagcctgggtgacacagcaagaccctgtctccaaaaaaaaaaagacagaaaaaaatccaaacagaaaagttgcatgcataatatcgtgaacacctgcacacccgcacaccctccacctcgattcaacatggtaccattctgcttcgtctgctttatctgtgcgtgtacccacacacttactattattattttttgctgacccacttgcatgtagttgcacttaagctttgctaagaataaggatattcccctacacaatcacagtaccataatcacatgtaagaaaattaacaccaattccttaacatctgccatgcagtccatattcagattttccatttgtctccaaaaagtctttcatggctgttttttccaaactgatatgcaatcatggttcagatgctccatttgtcaaataatgtctctttcatctgtttttaatctggaatatccacccccacttgtttcaagacattgacttgttgagggaacctccacctaccctcaactttttattttattttttataacggcaaatgctacacatctaattccatctctgatgtacacagaccctcgctggcacttctattttcagctttctgctcctgctccaagttaggaactcccaatggcttaaatgttttctcagataatctaatatgtggctgggcacagtggctcatgctataatcccagcactttgggaggccaaggcgggtggatcatgaggtcaggagttgaagaccagcctggccaacatggtgaaaccgtctctactaaaaatacaaaaattaaccaagcgtggtggcatgtgcctataatcccagctacttgggaggctgaggcaggagaattgcttaaacctgggaggtggaggttgcagtgagccaagactgcgccattgtactccagcctgagcgacagagtgagactccatctcaaattaaaaaaaaaaaatctaatatgcttctcttaatcatgaccctgatagtggtttaggcctgttcaaagcacttcacaatgactctaagaggtgggtaaattatcaccacctccatcttccgcatgaggaaactggagctcagaggggtgaagtcacttgccccaggtcacacagcaaagccaggatctgaacccaggcagtgtggctcactcacctgactgcagacgacctcctggcatggacttcttagccatctcggccagtactcctagccccaagcccacagccagtcctggagtgcaagagaagaacatgagtgcccgtttgcctggggtgcccccagcctaacccactctcctttctcagtttttctccaagaatgcttgtctcccaactctttttattttttcttttgtttgagatggagtctcgctctgttgcccaggctggagtgtggtggcacaatcttggttcactgcaacctccacctcccgggttcaagcgattctcctgcctcagcctcccgagtagctgggattacaggcacgcgcccaccacgcctggctaaattttttttgtatttttagtagagacggggtttcaccgtgttggccaggctggtctcgaactcctgacctcaggtgatcctcccgcctcggcctcccaaagtgctgggattataggcatgagacaccgcactcagtcttgtctcccaattctttgtatctctgtttccaaatcagtctctgactctgttcctgcatggggctccctttaaggtgcagcttcctctttctttaaccctttctccatgtctctgtctccctcccagcagttctcagccctggctgcacattccagttaccagaggagctccggtaaatataatgcccagactccactccccaaattctgattaaattggcctgagacatgggaatttgtgttttgttaaaaagcacctcagataattctaatgtgcgatcaaggttaagaaggcccctcggccgggcacagtggctcatgcctatgatcccagcactttgggaggccgaggtgggcagatcatctgaagtcaggaggtcgagaccagcctggccaacgtggagaaaccctgtctctactaaaaatacaaaatcagccgggcgtggtggtgcatgcctgtaatcccagctactcaagaggctgaggcaggagaatcgcttgaacctgggagacagaggttgcggtgagccgagatcacaccattgcactccagcctgggaaacaagagagaaactccgtctcaaaaaaaaaaaaaaaaagaaggccccgaaacaattgtcctaggtccctctgtcttctggtgactcttctttctctgtccacacctcctcttctttatgcttatctctttttctttttagagacagggtctcactctgtcgcccaggctggagtgcaatggcaccatcataactcactgcagcctcaaattcctgagctcaagtgatcctcttccctcagcctcctgagtagctgagaccacacgtgcataccaccacgctcacctaattttttattgagacagggtctcactatgttgcccaggctggtctggaactccagaactcacgtgatcctcctgcctcggcctcccaaagtgctgggattacaggtgtgggctaccaggcttgacctctccctttctaagccagttatttctgcatctcttgccttctccccatttgtcctatctatctagatctctttctctcttttcctccctttgatgttatctctccatctctgatttcctctgctacctctcctcttgtccctaaagacgtctcgggtctctctccttcttttgttgtcaccatctctgtcaattaccatatctggcattttctgtgtcctttctacatgtcaggggctgttcccagtgccttctgtgcacttactaatttttgtccttacatgaggtctccaccttcataaaatgtattttacagaaaacttccattttacagaaaaggaaattgaggttcagagaagtgaagtaatttgcccagagtcacgtcacaaagcgaggacacagcagagtcatcccttaatccctgggcagcctggtgccaaagctctaaccagtgcctttgactgcctctgcagactgtgaatctatctatgtatatatatatagattttttttttttgagacagagtttcactcttgctgcccaggctggagtgcaatggtgcgatcttggttcactgcaatctctacctcctgggtacaagcaagtgaatctatatttttaaaacttgaaccaggcggggcatggtagctcacgcctataatcccagcactttgggaggctgaggcaggtggatcacgaggtgaggagttcgagatcagcttgaccaacatggtgaaaccccatctctactaaaaatacagaaattagcggtcaggcacagtggctcacgtctgtaatcctggcactttaggaggccaaggcaggcggatcatgaggtcaggagatcgagaccatcctggccaacatggtgaaaccctgtctccctaagaaaaaaaaaaaaaaaaacaacaaaaaatagttggacgtggtggcgtgcatctgtaacccccgctactcaggaggctgaggcaggagaattgcttgaacctgggaggtggaggttgcagtgagctgagatcatgccactgcactccagtctgggtgacagagcaagactccatctcaaaaacaaaaacaaaaacaaaacttgaaccatgatcagcaataagaagacatttacgttataaccagtgcagaccaaggtatatgtttcacgaaacaagactttcccttgctctacaggtgcatgcatattttctgtcctattcttctttttaaatgctggttgcaacccactaaattatttcatgtgacttgcacgacatccggctgtgtaacccaaagtcaagtgacctcccctttgttagcctcaatgtcctcatgtacggaatagaacactcattgattcagtgcagcatgtgtgtatatgggacactgcacattacaggttctcagtaaatgttattatggccaggagcagtggctcatgcctagaaccccagcacttcgggaggccgaggcaggaggatcgcttgagaccaacttgagcaacatagggagaccctatctctacaaaaaaatattttttaaattacccaggccaggcacagtggcttcccgggcaccgtggctcacatctgtaaatcccaacactttgggaggccgaagtgggtggatcacttgaggtcaggagttcaagaccagcctggccaacatggtgaaattctgtctctactaaaagtacaaaaattagccaggcggccaggtgtggtggctcacgcctgtaatcccagcacttgggaaggctgaggcaggcggatcacaaagcgaggacatagcagagtcatcccttgaaccctgggcagcctggtgccaaagctctaccactgcctgacaaacatggtgaaaccccgtctctactaaaaatacaaaaattagccgggtgtggtggatgcatgcctgtaatcccagctacttgggagtgtgaggcaggagaatcggcttgaacccgggaggtggaggttgcagtgagccaagatggcgccactgcactccagcctgggtgacagagggatactccgtctcaaaaaaaaaaaaaaaaaaatagccaggcatagtggcaggcacctgtaatcccagctactcaggaggctgtggcaggagaattgcttgaatgtaggaggcagaggttgcaatgagccaagacggtgccactgcactccagcctgggcaacagagcgagactctgtctcaaaggaaaaaaaaaaaaaaattacccgggcggatggtgcacaactgtggtcccagctactcaggaggctgaggcgagagaattgcttgagcccagaagtttgaggctgcagtgatcgcgccactgcactccagcctgggtgacaaagtgagactctgtctcaaaaaaaaaaaaaaaaattatcatttatgttcctcttgatttctcttggccttgcaggcccttgcctttgtctctctttttttgtctctctctctttcctgtctctgattcatcctctcccttgcttcaatctgtaaatgttgccctttctaattgaggtcacaccaagatcccccaaagtcacacctacccccaaagttggccaagcggctgatgcgggaggcaggcaccttgcgttctcgagagcggtcactcagctgggaaatggggacaaggtctgagggtgggaaagtgggcatcgtggccagagagtgcagccactctgccaccacacccttccccaagctcagggggccagcagtattcgtggggtgttgctgggtgggtgggggtaatgatacctggggccggggtgtcttcctgggacgggcctcccgtgccctgcgaatgtcctcctcacccaggcctctcccaggcccatcctggtaaaacttttgggcccaagaacctccacatggtccctgcaagagatatactttgataaggaggggaggacatgggatcacctggcccttctggacccctcctgtccttttaccctctgaagtctccctcagcctcttccccttggggacctgctccctagcctcttacccagcggtggggcccaggccccagggccccacaaggccaaccaacagtctggcccagctgtccaccggtcccccgaagtaggccccccaccttcagccacattgcctggaggagaagaggagggattattcaggtgggagttgcctggcttcttggccaggcccccatgttcctctgtgtccaccctctctcattcccacccactaaatacttcctccactattaatagattcccacagtttctcctggttctcccctggttgctaggaacccttagctcttcctgcaggcctcccaaaacccactttcccccctctcccaaccctcgccgttgctagggtccgcccccgttactagacacccacagttcctcaggggctacctctccacttctctgaaacccccctcgttgctatgcaccgccttcccctctgttggccctgtaggcacccgcaattcctccggtgtccccccgcccgatccccaccccgttactgagcacctccccccgttgctaagcacccactgctctcagcctccgagtccgcaacctgctggggccctcctgtgcttccgggagcctctgtatgcccgcccccttcggccagccaaccaatggcgcggcagcaactcgctgactggcacggagtttctccatctgtgcgcgggggaaggggccagagagaggccctagcgatggagcctggaattaaggtgggcatcgggggcccatctggggggattgctgaggcatcgcgggagcgcaagcgtgccctgtctgcccttccactcacctcaaagtgccttgtacgcgacagacccttctgttccctacactttcttgcaaagtctcccttacaaacctgacgcctctcttctgcacgaatatcttgccaaccccccttcttatttttacccctggcaggctcaacacaattcctttgaatacacattcttcccagcaaacatttcccttgcacatggagcccctccactttgcacaaacacccacattctggcacccaacctccttccttgtgcatataaatcccttgccttgcttgccaactgtttcccgctcacgccttcaactctctcgtgtacataccctcccccccacttgcacactgagtctctgttccctcacacaccctgttctctccgctccccgcccacctgcggaatggtgcgactgggagccctctgcttcctgtaggcctgacatttcccagaacacactcagccaagattcccagtgctgagtcaggaaccttggcatcccagaaaaccacctcccatcctatctttctttctctgtgtgtgtgtgtgtgtgtgtgtgtgcgcgcgcgcgttggaaagcctgctctccccacaacaggctgactcacccacttctcacagtctggaatagaggcatctggttggggcatctttcccaccactgggagagggagggatgccgatgcttcccccacagaaccccgctgccccaacccctcttgtcgggaatcaggcctctttgtctctattcccgtactgtgtgacctcagaaaagccctcatccctctctggacttctccttcccaacctgtatgaggtactaggtgggctcctgccttcgatttctctcattggtctgtgaaaaggtgactcattttagagccttggacctgtgcccaatgtctcccccagttgactcaatttcaagacaaaccacctcctctcccccttcagaggtgaacggctgactcaggagctgggtggcagctcagccttgggggcaaaatatatcaaaatcacctaggacaataaataatcctactgggctacaactgacagtgccaggcccggggccacatgcttcacatacatgagatcatgtcagatagccccgtagctgcaagcaaagggtagaggccggcagatctctgagcctctgttctcacgtgtaaaatggagccctggcatccctattgttcagccttggagaatgaactgaaatcgtgtcagggtctgatacagaacaagtactctatacatgacagagatttcttacggaaaatccaatggagcgtaagtcatttgctcagggtagcggagctgggaactggcagaggaaggtctcgaacccacacccgtgggaactccaagtctttgaaagtccgtcccgcccctgcgtgaagaatgggcgcgcggctggactcgtcaccgggggttttagggaaggttgaacttgtcattcaaccgtgtagggagggtggtttagtcacaggggtggagggagggggcccactggcgcgccaccaggaccccggtgccctagatgcatacctggccgcgcttcggatgctcagaggcaaaccccctccccttgggaggcggagtcggacaaggctccgtctcgttccgttccgtcacgtccggtggggcggggcttcggggctttcccctttgaggggagtatcggttaacccttgcgcggcggggcgggctggagctccgcgggccggaacccgggagtcggggctccccagccacacccctcgcgggatttaaagggataggaggggccgggtcggccgaagcccgaaccgaaggagcgggcatgaggcgctgcccgtgccgtgggagcctgaacgaggcggaggccggggcgctgcccgcggcggcccgcatgggactggaggcgccgcgaggagggcggcggcggcagccgggacagcagcgacctgggcccggcgcaggggccccggcggggcggccggaggggggcgggccctgggcccggacagaggggtccagcctccacagcgagcctgagagggccggcctcgggcctgcgccggggacagagagtccgcaggcagaattctggacagacggacagactgagcccgcggcagctggccttggagtagagaccgagaggcccaagcaaaagacggagccagacaggtccagcctccggacgcatctagaatggagctggtcagagctggagacgacttgtctttggacggagaccgggacagatggcctttggactgatccgcacaggtccgacctccagtttcagcccgaggaggccagcccctggacacagccaggggttcatgggccctggacagagctggaaacgcatgggtcacagactcagccagagagggtcaagtcctgggctgataacctctggacccaccagaacagttccagcctccagactcacccagaaggagcctgtccctcaaaagagccaagtgctgatggctcctggaaagaattgtatactgatggctccaggacacaacaggatattgaaggtccctggacagagccatatactgatggctcccagaaaaaacaggatactgaagcagccaggaaacagcctggcactggtggtttccaaatacaacaggatactgatggctcctggacacaacctagcactgacggttcccagacagcacctgggacagactgcctcttgggagagcctgaggatggcccattagaggaaccagagcctggagaattgctgactcacctgtactctcacctgaagtgtagccccctgtgccctgtgccccgcctcatcattacccctgagacccctgagcctgaggcccagccagtgggacccccctcccgggttgaggggggcagcggcggcttctcctctgcctcttctttcgacgagtctgaggatgacgtggtggccgggggcggaggtgccagcgatcccgaggacaggtctggggtgagtgggacccatcctgcccttgagccacatcacgcaaaactccttattcctccgcctttgcttaggaagttctctacccatttactgttagttgcccaccagcaatttcatctccgggaacctcttccatccactgacctcctccctctgacagccaggttactaattcactccaggcaccccttcttaattctctcctttccccttcctgcactgtctccactcctgggggtctacaatggagggccactgaccgactttatggggcccaggaacccctgaaattgtaggactaaggagcctgccgtgcgtgttcacatacattgttgcagcgacggtctgacatctgtctaatcctctggaatctgaagaacactgggatagggagacaggcagggtgcactttctaccccacatttcttaatctggggcctgtggctgtcttaaagggtcacaaaccttcaccaccccttagcctatttgtatgtacatttttctagggagcaaagcgattcccccagcttgcatcagattcgcaaaagggctgtgtgaccccaaacgccaaaggatccttggcctagccgggagcccacctggtctcccctgtgacccctacatccccaaggagccccctgaacactcttgtttactttgtccaccgtcacccccagcttgggtgtggctctcccctggtgaatcaggaggaccggccgggcaggttcagggagggcgggacagagcagaggccggtgtgaaactggagagcctcacgtggggctgggagccgtggggctgggagccgagtccggagtccatcagcttgccagcttgcctgctgaggcctctttttgctctggggcccctggctggagtctgccctgagccccgcttcaccccacatgccttccttggggacgtgttcacacatgtggccctagctgtgagagacagacctgccttgacgtgcctgtgcctgtgtgcaggggctgaccctcctgggccccattgcttttttctctctgcctgccctctcacttccttggcatctcagaacagctgagctggaagtgggtgaataataataataataataataataataacaacaacaattagcactcactcatgtttagccctgtgctaagtgctgtgcttttattaactcactcactcctcgcagcaaccctaatgaggtagatactttttttttttttctgagacagtctcgctctgttgcccaggctggagtgcagtggtgccatctcggctcactgcagccttcacttcctgggttcaagtgattgtcctgcctcagcctcctgagtaggtgagacaccaggtgcccgccaccacacctggctcatttctgtattttgagtagagacagggtttcatcatgttggccaggctgacctcaagactcctgacctcaagtgatccacccgcctcagcctcccgaagtgctggaattaccagcatgagccactgcacccggctgaggtagatactattattatccccttttacagatgaggaaactgaggcacagagaattcaagtcacttgtccaaggatatcaccttgcaagatgcagatcaaataattctaatccttactgtacaccagacactgttttaagttttttcttcttttttttttttagtcttttttgtcaatttttttctgtcattttttatcttaaaatagcatctatcttaattaagggctttgtatgtgttaactctgagtccttatgacagcactgagattgtctccattcaacagatgggggccaggctcagtggcccaagcctgtaatcccagcactttgggaggccgaggcagggggatcacctaaggtcaggagttcaagaccagcctggccaacatgatgaaaccctgtctctactaaaatacaaaaattagccaggcgtgtgatggcgggcacctgtaatcccagctacttgggaggctgaggcaggagaatcgcttgaatgtgggaggcggaggttgcagtgagccgagattgcaccactgcactccagcctgggtgacagagcaagactcggtctcaaaaaaaaaaaaacaaaaacaacagatggggaagctgaggcatagagaggtgagagattctttgcttagggttggccacgtcaagtcagagccaggattctaactcagttctggctgagtttcaaacccatcgtttaaaccctccagtgtgtagatctgttcctaacttgtctccctcccaggcctccctatctccagtttttttctcatccttccagaatctgcctccatggcccagctttgtctgctcaggtgccctctctgagagcagtcaggggctcagtgctgcgtttggagcctccggtctccaggcgccttcccagaatcgacttccttccctcctcctgaccccctctgctgtaactaggcctgagtacacactgttccttgaacactcttctgttgtcctgcctccacgcattgctcaagccgttcccactgcccagcatacccgtgcttccttctcccttaattttgaaatcctctctgaccgtaaaggctcagcttcctttctccctttcctccttccttccttctcaccatcctgtcctttttttaaaattgtgttctctttctttttctttttttggtagggatggggtcttgctatcttgcccaggctggtcttgaactcctgggctcaagtgatcctcctgcctcagcctcccaaagtgctgggattacaggtgtgctatcctattcttctaatgagacaaaaatcactccctaagcccctaccatgtatttggtcctatgttagctttgctggggaaacagcagtgaccaagacactcatggagctcccaggcccatgaaagagacagaccaatcagccgacagtcacagttcagagtggtcaggaggatgtgtgagcccagaaggaggtcactggccagacacagggtatcagagagggcttcctggaggaaggggcatataagctgagaccattgtgaaaaaaatccgagaaagcccagataaaccattggatctaactttttttttttttttggagggcgtgcagtgcggagtttcactctgttgcctaggctgaagtgcagtggcgagatctcagttcactgcaacctcagcctcccgggttcaagtgattctcctgcctcggcctcccaagtagctgggactacaagcgcacgccaccacgcccggctaatttttttttttagtagagagtgggtttcactatgttggccaggctggttctgagctcctgacctcaggtgatccacccacctcagcctcccaaagtgctgggattacaagcatgagccactgtgcccggcccggatctaacataaaacagagagagaagatattatgtttatgattaaggggccaggtgtggtggcttatgcctataatcccagcactttgggaggctgaggtgggaggattgcctgagcccagaaatttgagaccaccctgggcaacacagtgagacctcatctctactaaaaggaaaaaagaactagctagatgtggtggtatatgcctgttttccagctattcgggaggctaaagcaggaggattgcttgagcctgggaggcagaggttgcagtgagccaagatcacacctctgcactccagcctgggcaacagagtgagatcctgtctcaaaaaaaaaaaaaattactattaaaaaaatcccaactaacattcttcagtccaagcatcaaagaatgtttctggagcgtctgtcgtgtgccaggccatgtgctggggacataatcataaccatgacaaccccagtctctgccatcatgagcttgtagtccagcaagtgtgtaggggataagccccaaggcactgggatccaaccagagctagaaccccagcgctgtgtggggtgatgttaggtaagtggcttcacctctcagaccctctgtttcctcctttgtaacaccgagacgataatctccctggggttgtgtttttagaaattaagtaggttgtggcacactgagtctttgtcattgtgtctggaatgttccaggtacttagtaaacaggaacctttattaatcatctcttccccagggccggcagctggattggggagggactagcccttcccgaaccctgactccctcttaaccttcccactgtcaaagagatgtctgtgaggtagctgggctctgagggggcgggagagatgaacacgtccctgatcctggggtaggagagggatgagccatacagtttccttctctggaggtgacccactcttccagtacttgctaagggacttgacatgcttgtggggtgcagaatgtattcctgtgtgtgtatgtgttcatgaatcagacactaaccctgtctcaaaaagctcatagtttagtcggcatgatacaacgaaaaccctgttttctatttgcttctctggttttctttctttctttcttatttttttgagtcagggtctcactgggtcacccagtctggagtgcagtggcacaatcactgctcactgcagcctcaccctccagggctcaagtgatcctcccaccttagcctcctgagtagctgggactacaggtgcacaccaccacgcctagctgattcttaattttttatttatttatttatttattttttgagatggagtctcgctttctcgcccaggctggagtgcagtggcacaatctcggctcactgcaacctctgcctctcaggttcacaccattctcctgcctcagcctcccgagtagctgggactgcaggtgcccgccaccatgcccagctaattttttgtatttttagtagagacggggtttcactgtgttagccaggatggtctcaatctcctgacctcatgatccgcctgcctcagcctcccaaagtgctgggattacaggcatgagccactgcgcccggcctaatttttaaacattttgtagagatggggtcttgctatattgcccaggctggcctcaatctcctgggctcagtggtcctcccaccttggtttcccagtgttgagattacaggcgtaagccatcgtacccgctgcttttgtggtttcctttgttctctctctctttgtctacttctgttcatctttttcttttcatcattactttgtatctctctcttttagtcttcctatatttgttttgttttttttttgtttttgagacagtcttgctctgtcgcccaggctggagtgcagtggcgtgttcttggctcaccgcaacctctgcctctcgggttcaaacgactctcatgcctcagcctcctgagtagctgggactacaggtgtgtatcaccacgcccggctaatttttgtatttttagtagaggtggggtttcaccatgttggccaggctggtctcaaactcctgacctcaggtgatctgcccacctcaccctcccgaaatgctgggattacaggtgagagccaccacacccggcctatttctttatcttttagcaattctatacctgtctctgtattagtcagggtaggtcaggattttctgcagtaacaaagagcccccaaatcttagtgacttagaacaacaaaggattattttgctttatactacacattggtcacaggtcagtggtgggtcaagggctctgcttcatgctgtcttcactcagggtcccaggctgagggagcttccatttcttttcttactccctcccccactggggaacaaacgtggcgagtcataaactggctcttaaggctcctacccgaaagtgacacttctgctcccagttaattggccaaagcaaggccaggtgtggtggctcacacctataatcccagcactttggagaccaagatgggaggattgcatgaggccaggagttcaagaccagcctgggcaacatagcaagatgccataaagtagctgggcatggtggcacacgcctgtagtcctgactactcaggaggctgggatgggagcatcgcttgagtccaggagttggaggttgcagtgagctatgatggtgccattgtactgcagtctggctgacggagtgagacccggtctctaaaacaaaacaaaacaaacaaaaaacaacaatccccagttcaggagggcagggacatccctgaactaatagctggagctatgtggtgaacagctgtcatgactgccacggtctctgtcgctgtctctgtctctctgtcatcactatgtcatctgcctctctgtttctgtctctctctgtggtccatctccatccatcaactcctgcctctataattttccccaaaaggtctgacctggtttagggacagagatggggcttccaatatttgacactggtccctacataatggcttatgcctgaaaccccaacactttgggagactgaggcaggtggactgcttgaggtcaggagctcaagaccagcttgggcaacatggtgaaaccccatctctactaaaaatacaaaaattagccagacatggtggcatgcacctgtagtcccagctactcggagggtgaggcaggaggatcacttgaacctcggaggcagaggttgcagtgagccaagatcataccactgcactctggactaggtgacagagaccctgtctcaattaaaaaaaaaaaaaaaagaagatttggaactgtgtatgtgcagtggaagatgtaagggttgtttgttaaaccacaacaaaacctagcctgtccttactcataagatccttactcataagagaaggacagagagacatagatacaaagaaagtgatgacagaggggagaaatgggcaaagaatttcccctatcttgctgagggctttgggcgatcatgtgattgccgaactaagtggggctcactcaccccaacaagcctgggaacagtgatcccaggaagcccctggccctggaaagactgcaggtcccctttcgttccctctcatggcagcacctctagcccctgccttccctggccttggccctgaccccaccctgctctgctccctacagagcaaaccctggaagaagctgaagacagttctgaagtattcaccctttgtggtctccttccgaaaacactacccttgggtccagctttctggacatgctggtaagtggggtggtggtggacagagctgggcagagtctcctgggccagggaaagggatgttctctgtagtttagttcccccacctagtgatgggcttggtgacagtccccaccttatgggactgttatgggcagtgcttaggcctgggcctggcccttcgtatgtcagggcagagggctattccttgttattctggtggagagagggagcttcagacggacctgagctcaaaccctagttctgctctgtattcatgggtgaccttgggcaagttactttcctttactgggcctcagctgccccatctgttaatgtggagataaccttacctcccttgcaggattaaccgaagagttaaaatcaaaatgtatataaagattgaggccaggcacggtggcttacatctgtaatcctagcactttggcaggccaaaacaggaggatcgcttgagcccaggagtttaagaccaacctaggcaatatagtgagaccccgtttcaattaaaaaaaaaaaaagattggctgggcgcagtggctcatgcctgtaatcccaggcctttgggaggccgaggtgggtggatcccctgaggtcaggagtttaagaccagcctggccaatgtggtgaaatcccttctctactaaaaataaaaaaattagccaggcatggtggcgggtgcctgtaatcccagctactcaggaggctgaggcaggagaatcacttgaacccgggaggtgaaggttgcagtgagccaagatcgcagcattgcactgcagcctgagtgacaagagcgaaacttcgtctcaaaaaaaaaaaagactgaggcacaggactcttatgaatggaaatgatcactccttgccttctccgcgtgttcagagcatagcaggccttcagtaagtagcagctgtaacattttgcccccaggaccttgcaaatgcctgcagcacagagtagcacaatggtggcatatagtgctcttttgaaaggctaggccataaatatcttaggttttgtgggcctatggtctctgtcgcaactactcagctctgctgttacagcaggaaagctgccatagacactatgtaaacatatgagtgtgtctgtattccaataaaactttatttgcaaaaaccagcagcaggctggactagaaaagtgtgcccattggcaaatggcgacagtaagagaatttgtctgccttgtttgtctttagatctgacctggaaataaggcaagaccccctaaaactgtgtcaacacaagtttgccatctatatgtgttctggttactattgctgagtttattaaaaaaacaaaactcagcagagcacagcggctcatggctgtagttctagcactttgggaggctgaggtgggaggatcacttgagcccaggagtttgagaccagcctgggtgacatagtgagaccttgtctctacgaaaaataaagaaattaactgggcatggtggcatgcacctgtggtcccaggtacttgggagctgagggtgggaagatcacttgagtccaggaggtctgggatgcagtgagccttgatcgcaccacagtactctagcctagatgaccgagtgagaccctgtctcaaaaataaatacgccaggggcggtggctcacgcctgtaatcccagcactttgggaggccaaggcaggcggatcacgaggtcaggagatcgagaccatcctggctaacaaagtgaaaccccgtctctactaaaaatacaaaaaattagccgggcatggtggcgggcgcctgtaatcccagctactcgggaggctgaggcaggagaatggcgtgaacccgggaggcggaggttgcagtgagccgagatagcaccactgcactccagcctgggtgacagagcgagactctgtctcaaaaataaataaataaataaaataaaataaaataaatacaaaacaaaacccaaaaaccccaagacttagtgatggttaaaaaaaataacttagtagaataaaacaatcattttattgacctcagaagttttgggtcagcaattcagacaggatggcagggatggcttttcactgctccacaatatctgggaactcagctagggacacctggaggctacaagctgaaaacttttggaggttcattcacttgcatgcgtggtgattgatgctggctattggctggggtctcagatggggctgccacgtggctttgccatgtagctccttgagcttcctcacagtatggtggcctcagagtactcagatttctaacaagacagctcaggactaccttgaaggtaagtgtctctgccaacagaagtcatgcagtagcacttctgccataaaccgtcccatatttaatgggagagcaatctattttttatttattcatttaattttgagataggatctcagtgttgcccaggcgggagtgcagtggtgcagtcatagctcattgcagccttgaactcctggccttaaaggatcctcctgcctcaacctcccagagtgttgggattataggcatgagccactgcacccagcttgggagagcaattaagagtatactccttgatgggaaaattctataagagcaggatcaggaatgggtctgagacccactgtgatcaggagatactgttgtagccaactttggaaaatgtaatccaggctggacataatcacagcactttgggaggctgagatgggaggatcatttgaggccaggagttcgagaccagcctgggcatcatagcaacactaccccaacccgacattacacattttttttttttagattagctgggagtggtgggggtgcacacctgtagtcctagctactctggtggttgaggtgggaggatcacctgaatctaggagcttgaggctgcagtgagctatgattataccactcaatttcagcctgggtgacagagtgagatcctctcaaataaaaaaagaaaaagaaaatataatctgaaaatacagctggccactagaagaaattagaattattataatctatacactctgcgtggtccaggaaatgcttgatctataaattaacttaaataggccctggttgttagcaccttgggattccaggcagcagcaaaagcaaatccactctggagagtgacgctctggacttagatctcacagaattcccacagatgatcacatgtgtacaatcaaaaattacaaaacaaattaggatatcctgtgctgggaacaggacttggtttaagcaacagagaacagaaattcgccctttccttaccaacccctgggcaagacttttaagagttgcggcctgggcacagtggctcacgcttgtaatcccagcactttgggaggccaaggcgggtggatcatctgaggtcaggagttcaagaccagcctgaccaacaaggtgaaaccctgtctctactaaaaatacaaaaattagctgggcttggtggtgtgcacctgtaatcccagctacttgagaggctgaagcaggagaattgcttgaacccgggaggcggaggttgcagtgagccgagatcgcaccattgcactccagcctgggcaacagagtgggactccatctcaaaaaaataaaataaaatcttaaaatcattaaaaaaaaagttgcagggagagaaagcattgcaggagggtcgggcaagataatggtggccaggatctgatgcaaacaggcagctgcggagaggttctcttcctgatccagttcctgatcctctcatttattctaccacctttagggaacttccaggcaggagaggatggtcggattctgaaacgtttctgtcagtgtgagcagcgcagcctggagcagctgatgaaagacccgctgcgacctttcgtgcctgcctactatggcatggtgctgcaggatggccagaccttcaaccagatggaagacctcctggctgactttgagggcccctccattatggactgcaagatgggcagcaggtggggctggggcagccctggggcagggatggagggcagggggtgggcattattgaaaatattggcctggccaggcgcggtggctcacgcctgtaatcccagcactttgggaggccgaggctggtggatcacctgaggttgggagttccaaaccagcctgaccaacgtggtgaagccctgtctctactaaaaatacaaaaaattagccaggcgtggtggtgcatgcctgtaatcccagctactcaggaggctgaggcaggagaattgcctgaacctgggaggtggaggttgcggtgagctgagattgagccattgcactccagcctgggcaacaagagtggaaccctgtctcaaaaaaaagaaaagaaaagaaaagaaaatagcgccaagtccattttcaaagtggttgtaccagtgtaccttcccaccaccatgtatgagtgttacagtcgtcccagattctcaccggtgcttggtactgtctgttttattaacttaaaccattccgatgggtttggaataggatccctttttttcctctttgagacagagtcttactctatcgcccaggctggagtgcagtggcacgatctcggctcactgcaatctccacctcctgggtttaagtgattctcctgtgtaaaccaagtagctaggattacaagcgcccgccaccacacctggctaatttttgtattattagtagagatggggtttcaccatgttggccaggctggtctggaactcctgacctcagatgatccacccactacggcctcccagaatgctgggattataggcgtgagccaccacgcctagtctgcaagaagtgaactctaattgctttctccagctgggttcagtggctctcacctataatcccaacactctgggaggctgtatacacacacacacacagacacacacacacagacacacacatagtcttcaactctcccatttcattcttttagtagtcttttgataaacatatttttataaacaaaatagtatttgtattattactcttttttgagacagagtctcattctgttgccccgactgaagtgaaggagcatgattatagctcacagtagccttgaactcctgggctcaggcggtcctttcaccttagcctccagagtagctgggactataggtatgtcccaccaggcttggctatattttattttttatagagacatggtctccctgtactgcccaggctggtcttgaacccctgagctcaagtgatcctccttcttctgccccctgagtagctgggactgtaggtgcatactatcacacctagctaattttcaattttttgtagagacaggctatttaggaaaagctctgaatccatgcttttccgttctcacaccactgccacaacaatgagagcacagaagacttctgtgaccaaatgtttaggttttttaaccccacacaccaagcaacggacaccagctggatgtcctccaattcaagtctaaaaccatctacctggaaatagtgtcagatcccacaggttggggactcagtccccaagactgccccccagttacagacaccagtcataagttcaggccttcgaaacttctgactgattggctccaagttggagttcccatgtcctcctctttgggttcaaataatttgctggagtggctcaaataactcagggggatacttacttacctttactggtttaatataaagcaggggtccccaacccctgggccgcagaccagtaccggtccatggcctcttaggaacggggccccaccgtaggaggccagcgagcattaccgcttgaactccacctcctgtcagactagcgggcaggagattctctggagggcgaaccctattgtgaactgtgcctgcaagggatctagattgtatgctcctatgagaatctaattgatacttgatgacctgaggtagaagagtttcatccagaaaccatccccctcacagtctgtgggaaaaattatcttctacaaaaccagtccctggttgggtactgctacaaaggatactgcaaaagatgaagagaagtgtagggcaaggtatgggggaaggggtacggagcttccatgccctccctgggcgcaccacgctccaggaacctccacagggtcagctatctggaagctcctgagcccaatccttggtttttttttttttttttttttttttgagagggagtcttgctctgtgtcccaggctggaatgcagtggcctgatccgcccgccttggcctcccaaagtgctgggattagagatgtgagccaccatgcccagcctaatccttgggtttttatggaggctttaagacaccagcattccttcccccagagtatagggtgggatcctctctggggagggtcctaagacccacagtcaggaaggtggggaaagattagagtcctgccttggggcaggtgaaaggagggcaggaggaggtcagagattttggtttcttgagccagcttctgagatctaacacacctaaaattataacaaaagattgtggctgggcgcagtggctcatgcctgtaatcccagcactttgggaggccaaggcaggcagatcacttgaggccagttcaagacaagcctgggcaacatggtgaaactctgactctactaaaaaaatacaaaaatgtgccaggtgtggtggtatactcttgtaattccagctactcaggaggctgaggtgggaggatcacttgaacccgggaggtcctagaagttgcagtgagccaagatcacgccactgtactccagccttggtgacagagcaagactccatctcaaaaaaaaaaaaaaaaaaaggctgggcgtagtggctcacacttgtaaatgggaggcagaggcaggccgatcacgaggtcaggagttcgagaccagcctggccaacatcgtgaaaccccatctctactaaaaatacaaaaaattatccgggtgtggtggcgggcacctgtaatcccagctactcaggaggctgaggcaggagaatcgcttgaatccgcgaggcagaggttgcagtgacccgagatcaccaccattccattgcactctagctcgggcgggcgtcaaaaaaaaaaaaaaaaaaaaaaaaaagattgtaacaagggctatgagagttaccagccaggaaccatagagggaaaccaatatacattgtaactaacaccgggtctcgctatgttgccgaggctgatcttgactttctgggctcaagtgaacctcctgccttggcctcccaaagtgttggggttacagatgtgaacactgcacctggccctacctttaatttagtccagtttgtcagtttttttcattgtgtttaagaaatcttttcctactccaagatcatgcaaatattatgttttcttctacaagctttattgttttagctttcatatttagacctacattccagatagaattaatgtttctgtgtgtgggaggtagggatcaggttcatttttttccatatggattgttgacccagcactgtttattgaaaagacttccctttccccactgaattgcagtgcctagtcataactgcacaactctacgtgtgtgtctttgtggactctgttgtattctgtgcattgatttgcccattcttgtgccacactgtggctttatgtcttaatatcaggaagggtaagccctccagtttgttctacataatttcctttgtcacatcctctgtgtgctcaggacctatctggaagaggagctagtgaaggcacgggaacgtccccgtccccggaaggacatgtatgagaagatggtggctgtggaccctggggcccctacccctgaggagcatgcccagggtgcagtcaccaagccccgctacatgcagtggagggaaaccatgagctccacctctaccctgggcttccggatcgagggcatcaaggtgaggaccaggaaccgcctggcctgtcccgggaaggcctatagccagatcccaggcagggcttcttggggaaagccacgagagagtgcaggagacggcgtgggatgaaaggctggggctggggaagcccagcctctttcttacctccatacccatcagagcccaggttctgtttatccgtctgcctgagcatctcctgagtccatcttttcctcctctccttctccatggtcatgtcctagtccagccccatcttctcctgcctctgtctccctgggcatcctggccctggtctccctgcagcacaagagctggagggatccctttcccccagctatggagaaggtttctctttttctttcttgcattcctttttctttgtcaaattaaatataattgtatgaataggccaggcatggtggctcatgcctgtaatcccagcactttgggaggccaaggcaggaggattgcttgaggccaggagtagttcaggactaagctggccaacatagggagcttctgtttctagaagaaaaaaaaattgtttgaatagctagtcacacagttcaaaagtcaaaataatattataaaagggtaaatgtggagaaatttctctcccaactctgctgctgtccttcccattctgtccctctatccctctacctgctcatggggaaccactttgtcagtttcttgtatttcttcctgttagtgccagtaaatggagttgtagatccgaaatgttcctcagtacgcatactgattggtactttgctattttcacttaatagtaacaccctgcagagttttccacatcattccatagaaagcttcctctttctgtttttttttcccccacagctatgtaacactgtttttgtgactgtgcctggtcccctatagacagacacctgggttgtttccattttttgccattagcaggcctcaaagaatcactttgtatataagacattttgcaagtatgcagattgagctgtagatttccagaagcaggactcctgggtcaaagcttaaaggcatgggaaatttgcgagagatgaccaaacttccactctcggtgttatgccactgcacatcccaccagcaatgtatgagaatgcctgttgcagatccgaccatgccattctcctgttcgaaacccttctgtggctccctagtaccttgaagtgaagttccatagcctgtagggccctctaggatctagcctcttctctctcattcttctcttttcttttttttttgagaaagagtctcgctctgtcacccaggctagagtgccatggcacagtctcaactaattgcaacctccacctcttgggttcaagcgattctcccacctcagcttcctgacttgacgtgattactggcacgcactaccatgcctggctaattgttgtttttttttttttttttgagacagagtctcgctctgttgcccaggctagagtgcagtagtacagtcttagctcactgcaaacctctgcctcccgggttcaagcgattcttctgcctcagcctcccaagtagctgggattacaggtgtgcaccaccgctcctggctaatttttgtatttttagtagagacagggtttcaccatattgaccaggctggtcctgaactcctgaccttgtgatccacccgccttggcctcacaaagtgctgggatgattacaggcgtgagccactgtgcccggcctaatgtttgtatttttaagagaggcggggtttcactatgttgaccaggctgatcttgaactcctggcctcaagtgatctgcctgacttagcctcccaaagtgcagggattataggcgtgagccaccacgcccaacctctcattcctctcattctttctgtgtaccttcaggcacagtgaagcacttgcatttacttgaaataggcttgctttttcctgccacaaggcctctgcacccctctgccaggaatgctcttctattttttttttttttgagacagggtctcactctgtcatcccccaggctggagtacagtggcgcgatcacagctcactgcagcctcaatctcctaaactcaagtgatccccccacctcagtcttttgagtagctgggacacaggtgcgtgccaccacaccctggtctcttccgtctgtgccccctggtctggttgattctcagtcatttttctgtctcctttcaaattttgcttcctcagggaagccctccctgatttctgttctactgatcagggtcccctcttcacctcctcatagctccttatactctttcattattcttatcttcctttctgatcatcttaatcagtgtctgccccctcatctgactgtgtctgtcgtgttactccctattgccaagtgcccacatagcacctggcacagtgtggcagatgacttaggtgggttctctgagccctactgaaacataacagataacattagtctcattagtctcaaataactatatgccaggcactgtgctgtgcatcctacacacctggtttcctctaatccttacaccagccttagcaagtagacaccaacacaattcccgttttccagatgaggaaactgaggctgaggcagctgaaatgacttaagactgcccagctagaaaagagcagagatggccaggtgcagtggctcacgccagtaatcctagcactttgggaggccaaggcgggcggagcatgaggtcaggagatcgagaccatcctggctaacatggtgaaaccccgttgctactaaaaatacaaaaaattagccaggcgtggtggcgggagcctgtagtcccagctatcaggaggctgaggcaggagaatggcatgaacccagggggcggagcttgcagtgagcccaggttgcaccactgcactccagcctgggtgacagagtgagactctgtcaaaaaaaaaaagaaaagagcagagtcacgattcacagccagctccaccctgctccaaagcccactttcctagatgggttcaaccaggaggttcaaggttggaagggtgtggaaggactggggctcaggcatgtgacctggggctgggttgagctgggctgggcaggtaagctggcttcctcctctggcagcaagtgtgcaggcaggtgggtggccctgggaagttgttttttttgagacagagtcttgttctgtcacccaggctcgaatgtagtggtgcaatcaatgctcactgcaacctctgcctcccgggtttaagcgattttcctgcctcagcctcccgagtagctgggattacaggcgcccgccaccacacttggctaattttttgtatttttagtagaaacggggtttcaccgtgttggccaggctggttgtgaactcctgacctcaagtgatcctcccgcctcggcctcccaaagcactgggattataggcatgatcccacacctgggaccacaggtgcatactaccacaccagaattttttttttttttaaatagagatggggtcttgctgtgttgcccaggctggtcttggccaccgcgcccggcctcctgggaggtatttgaggttgctgggtattgggtgcgggaaggaaaagcccatgaccctgcccctccacaccctgccctacagaaggcagatgggacctgtaacaccaacttcaagaagacgcaggcactggagcaggtgacaaaagtgctggaggacttcgtggatggagaccacgtcatcctggtgagtgggacacccatgtcccagaatgtagcagcttaagacagccaccatttattcttgctccagagtcagtggtcttctgctttgggtggggctggactgatactggctggctttgctcagtctgaggtcagctggtggcttggcaaggctggctggtccagggggccctgctcccagctctgccggttggctcatgacttggccgcacgtctctcgatagcaggatggcctgggcttgctctcacagtggaggcagggggccaagagaacaagtaaaaatgcaaggcctcttgatgcctgggctcagaatggccaccatcatttctgccgttcggcaagtcatgtgacccagcctggatcgaggggtctggagacagactccgcctccggatgggagtggaaattcatggaatccaccactcttctccatgccaccttgatgaatccaagccctcactcctctgccctgtcttccccatggctcccctattccatcctggctagagcctgcctgctcctttgggggaatggggtgaggtcagagctcaaggtgggcaaggccccacaaagtccccatgctaaccaaagaacgctccctgtcacacagcaaaagtacgtggcatgcctagaagaacttcgtgaagctctggagatctcccccttcttcaagacccacgaggtgcgagccctggcttccatgggtggatgtatgggtgtcggggtccaggtgcatggaggggaaaccattgatgagttacaggtcaaagatataaaaaggggctgggcgttgtggcccgcacctgtaataccagcactttgggaggctgaggtgggaggattgctggagcccaggagtgccaagaccagcctgggaagcacagcaagaccccgtctctatttggaaaaaaaaaaaaaaaaaaaggccgggtgcagtggctcatgcctgtaatcccagcactttgggaggctgaggcgggcggatcacttgaggtcgggagtttgaggccagcctggccaacatggcgaaaccccgtctctattaaaaatacaaaaattggctgggtgcggtggctcatgcctgtaatcccagcactttgggaggccgaggtgagcagatcacgaggtcaggagatcgagaccatcctggctaacacagtgaaaccccgtctctactaaaaaatacaaaaaattagccgggcgtggtggcgggcgcctgtagtcccagctacttgggaggctgaggcaggagaatggcatgaacccgggaggtggagcttgcagtgagccgagattgtgccgctgcactccagcctgggcaacagagtgagactctgtctcaacaacaacaacaacaacaacaaaattagccagaaattgcttgaacccagtaggcagaggttgcagtgagctgagattgtgtcactgcactccagcctgggcaacagagtgagactctgtctcaaaaaaaaagcaaagctaggcatggtggtgcacacctgtagtctcagctactcaggaggctgaggcaggaagagggcttgagtccaggaggtcaaggctgcagtgcattttgattatgcctcacactgaacatttgctgtgtatttgctatgtaccaagcactgtcttaagcacttaatgtagattaattcctacatataatatgcccagcagcctctgaggtaaatgatcctacagtcgaccccttatcctcaggtgatctcctccaaacccccagtggatgccggaaactgtggatagtactgaactatagactgtgttttctcgatctgataaccaagatggctcctaggtgactagtgggtgggttgcggatacagcatagacttgctgaacaaagggatgattcgcatcccaggtgggacgaagcgggatggcacgagatttcatcacagtagttaaaccaatgtgcaacttaaaacttacacattgtttgtttctggaattttccacttaatatttttggatcgcacttgactgagagtaactaaaaccaaagaaaatgaaaccacggactggggagactaactgtattactctcactttgtatatgaggacgcagaaccacagagaggttaagacacctgcctaaggctgcacagacaggaggtggcacagccaggatatgaatcaggcagccaggctccagggttcatgctgtcaatcaccctgctctgctgcctgtcaggaagggaccttggccagtgcctgctcctcccttaacctcccgtctctaccccggcaggtggtaggcagctccctcctcttcgtgcacgaccacaccggcctggccaaggtctggatgatagacttcggcaagacggtggccttgcccgaccaccagacgctcagccacaggctgccctgggctgagggcaaccgtgaggacggctacctctggggcctggacaacatgatctgcctcctgcaggggctggcacagagctgagctgctcagccaccatcaggttaattggatggcgccagtctggctggaggagccctgagatgccatgggaggcctgaggttggccacgggggagctggcctccagggacgggagagattgtgtcatgtgccacacgagaccaacgtggaaaagtctgaagggccttgggagaccaggtagcacctggccccatcatgatgcaggggttttggggacctggaaggaaggtgatgaggcagtgagtcagaaaaaccagaacggggtccccggatctgccgggaaggcttctgaggggctgccctgagagcattcagttcacatgtcacagggtatggtgtgacagggtgcctgtggacacatgaatcacttctaacctgcctccctgtcagcctccaggctgccagctggctgaggccagggactgggtcaggctcatctgtggcgcctcagagggtcagcatcattggtgaacagatgcaggcgctgctggaccatctggggagagtgacagtccatgtcttcaccagggagccatttgagtgctgagcgacaagaggctcagagggcatgaccccatgggactggatgcggcctgagggctgataccgctgggcggtatcctgccctgctgtggccctgtgggatcctccgtgttcctcggcggactctgctgacctcctgcagacccaaaccacagccacatcccagcttctgtgccagcactgtgacagtacctcgctcctctgtgcaccagatccggcctcaggacttacacctcctgcctgacccccaggcttctctctcctttctcccagcaaactgcagtggcagaaaggaggttcagaggctgggaaagtgggcctccccttgcaactcagagctgctgcactcaggagggccccatccaatcccgggcccctgcagggaaaagcgctgggtgtgtgtcagaggcgcagggtgggtggggctgccagccaggaccctggcctgcagcctgatccaaaccaaagactgtagaaccctggggtgtggctaacggcccctccagcacccatagccaggtcttcctggcccttgaggctgggctggcggacaggcacctacctcttccttaagctgaagctcccacactgtcttccagggctgaggagatgctctccttttctactgaccatcttgatacttatttatacgagaggcagttgctggacggggtagtactgggaagcaggaggcagaatggctctgctgagcctcctacccatgacaacaccccaataaacagaacattcagagccaatgtcgtagagctttttattttgcatctggagtgtatttggacacgtgggctgggtggggtaacaggataatgagcagtttgggaaagaggcaggctccaagcaggctggttcactcacttggcagtcactgggcggctattcttgtgcctggatgtgttacaatgcaggggacacagtggtgagcaaggctgctccaagccctggctgggatgggggatgcacagacaggctgatcagggctgggatggtggacacgcatcctctttaccctgatcactggttagaaatactgcactgtggccgggctcagtggctcacacctgtaatcccagcactttgggaggccgaggcgggtggattactcaaggtcaggagttcgagaccagcctggccaacatggcaaagccccgtctctactaaaaatacaaaaaattagccaggcatggtggtgcatgcctgtaatcccagttacttggggggctgaggcaggagaatcacttgaacctgggaagtggaggctggagtgagctgagatcacgccaccgcactccagcctggacgacagaacgagactccatctaaaaaaaaaaaaagcaacagtgctctgtagtttccctaaatgagatgggctcagttagggacagagaagtgatccagacaggcctgttcctccttcagagtggaggggtcaggtattcatgaagctagtaatcacacacactcactagaagtttgtataagtggacaggaaagtttgtggtcagcaccataatgttcagggagccaggagacagcctggctgagatactgactacctagcttgaatcctgaccttgccatgtgctagtcatgtgacctcaggccagtgattccacttctccaggcctcagtcttgccatctgtcaaatcgggtccatctagcaccccccttacagggttgccagatctgctaacacaggtagaggggctggcacaggtaactgctcccagatgggctttaaaactgtgaagacatgaggtgggggaggggtgtcttgactggggctgcaggactcttccctgaggtagtgatacctgagccccaatggaaaagttaaggagtgatccgcagcagagggctgggggtgggactcaatgatccggggatttgaacaacacttcagggatctaaaaggccagtatgactagtaggtggcaagcatgaggaagaccttgggctaaggaggggtgagctgaggctgacgcagttcagtgtccctgtcctgtgagaagcagagggcccaggcaggaggttcctcaaatgtctagtgagatgacagaggcggcccctagtgagaaacagacgatgcgacattcagatggaataggcaggccgcagggtccgggctgttgtcaatctctccctagagggaccagctggtgctcaatactgcagggggtggccctgatgaaggaggactggagacccctgagacctagcttcaatcttgtcgccatcacacagtgggagaagtgtaggcacacttcaaatggttaccgagctaggctgcagcctgagaccgcagccgcagctaatggctgcagtcctgtggtgtgaggagcagggcctggccacagaggccagcccgtaccccacccacgggcaccacgtacacccggccgtcagtggcccgtgagggcgagaagtccgtcagctgcaggttgctctcccggacctggtcgtagtcccacagctgatagtgccaactcttgccctgcttggacagcaggtagacagctcccggggagccctcctctggcagggatggtggttggcagggcgtgcccagcactgggtggaacaggcccggcagctcagggtcctcagtgtagccgagactgggcacagcccgaacacccagcaggacccctgggggagaggagaaggtggtgagtggcagtgactgagccaggaccaggtgctggggctcactaagttccgccctctcccggccctccagggtgggtgcagctgccattcctaggttacggtgacgttagtggtggccagtgggttgggatttggacccaccgtggcacccggctccaaagctgtaggtgttttaagtcttgcctcatctggcctgagcacaggggaggtggggaggcagcatgagatgaagcaaatgccgtcacccggtcatcctcagctctttagggaagaggctccaagaggagctgtcaagaccacaaagccatgaagaagctgagcggagcctcccccggacctcctgacgcggaccaacctggccttctttctttcaggcagggggaatgatgaaaacggtgctggtaatacttacagagacatgtcacacgccaagccctgttctattttttttttttttttgagatggagtcttgctctgtcacccaggttggagtgcagtggcacgatctcagctcactgcaacctccgcctcccaggtccaagcaattttcctgcttcagcctcccaagtagctaggatttcaggcatacaccaccacgcctggctaatttttgtatttttagtagagacagggtatcaccatgttggccaggctggtctcaaactcctgacctcaagcgatccacccaccttggcctcccgaagtgctgggattacaggcgtgagccaccgcgcctggccaagccttgttctaagagtgctgagtgctctgcctacaaggcagccttatgaggtgggtactgttacccccaatttccagatggggaaaggagctgtccagagaggtgatgatacctgcccagagtcacagagcctagaagaggctgtgccaggcctggagcccagacggtctgatcctgaaatctgtgctctgagcttctgtttgtagaagctccaactggcagacacctggggcccagcctgcccggtgctaatgctaagtgcccagcctggctggggaggcaccagcacaaggggtgagaatgtcaggaggattaatggaggccggggagacccaggttgaggggtgcagacaaaggagggggaacccacctgcactcaccgcccagtgtgccttgtggcccttcctctgacacggctcatggttgaagtcctcgtcgtagctggtgctggcattaaggtaaaaacgatggtgtggccctgggacccaccctttgccacccctgccctcctctctcccaggccctgggatacgggatgagcaggggatgtccagtgaccaggtgctgcaggacgaggtctctgttgggaccgcccaggccaccagagagcagcttggcctggcagcccagcacctcctgggccagcctgcccatatcggccactgcagggtgagagcacacagagggggcttgctgcatgtgcccagcaccgtgctgagggctcacagtgggcgatgcttccaaccctcaccatgaccttccaccccttggtacaaatgcagaaaatgaggcacaaagagcgtgagtggcttgtccatggccccagcgaagaggtggcagagctgggtttgcaacctaggcagccagctcaagtccatcttgtaacctctctgctctactgggcagtgggaagggcccaaagaatggaatgagacaccctgacacacggctgccagcatcccacccagcctctctggtcccagcctcatgaagagatgatggagcatgcagtcacccagctcacctgagaacatctctccctgggccgtgtagcctctttccgtggccacccgtatgagtctctccagggggacgccactggggggcgacaggagagtacctgccatccacaaggccaccagcccgcatctggggacagagaggcccagcctgtcaatcctatgtcacagcccccttacctggaagctggagttggggaacaggtttgctgccctggaggagtccccctcccctctcccaggccagcgagggagacctgactccccttcaggggagagcccagggctggagggctgggggtggaaggcgggggagaggtcacctgagcttcctgggaggaggaaccaaggtggagttagagagatggaccaggctcattcgttcattcctcgcatgtcccaactatgtttactatgcaggcactcagaagcctgagtggaaagttccccctttccttccctcctcctcccagcagggacaatccactcctcttctccagatcagtccttaagaagcccagcaagggcagagtaaaggcagcagatgggctggggttcccgcatcagggcacatactgagggccttcttggatgagggacggcaggtctgcacagaagaggatccaccgcaggtcacctcggaacctgaagcagagccgtgctcagtcaccagggagccagctctgaagcaccccctaccctgaggtctggctgggagtggtcgtatccagggatgatgaagggaatatgggcctggctgtcctaaggctgaaggcggctcctggttcagtcactgacttcccctccccaagcttcagtttcctcatctggtttgtgggaatggtccttctgcctgcctgctccctgctcgctctctcagttattgaagggtgaggagcaaagggtggcactttgcaaccaggtttatctgaggaaatttctcaaagtggtatctctatctccaactctttttcttgctctgttgcccaggatggaatgcaatgatgcaatcaaagctcactgcagcctcgacctcccagggtcaagttattcctcctgcctcggcttcctgagtagctgggagtataggcatgcaccaccatgtccagctagttctttttattttattttattttgagacagagttttgctcgttttgcccatactggagtgcaacagcgcgatctcagctcactgcaacccctacctcccgggttcaagtgggtctcctgcctcagcctcccgagtagctgggattacaggcatgcgccaccacgcccagctaattttgtatttttagtagaaacggggtttcaccatgttggccaggctggtctcgaattcctgacctcaggttatccacccaccttggcctcccaaagtgctggggattataggcgtgagccaccgtgcccgactctttttatttttagtagagatgagatcatgctatatgttgcccaggctccaaactctgtgatttgtttttcgcttcaagtctgtttcctgggctgttcaacaatgaaaatcccttaactgaactttgaataaaaccaggtaacaacatgcttaaggcctaaaacatcaccttgatagtgaatctttgtaccctgggggaggccactcagatagtctggccctgagggattcattcctttttgtttgtttgtttgtttgttttttgggacagagtttccctcttgttgctccggctggagtgcaatggtgcgatcttggctcaccacaacctccgcctcctgggttcaagcgattctcctgcctcagcctcctgagtagctgggattataggcatgcgccaccatgcctggctaagtttttgtttttgtttttgtttttttttgagacagctggagtgcagtggcccgatcttggctcactgcaagctctgcctcccgggttcacgccattctcctgcctcagcctcccgaatagctgggactgcaggctcccgccaccacacctggctaattttttgtatttttagtagcaacagggtttcaccctgttagccaggatggtctcgatctcctgacttcgtgatttgcccgcctcagcctaccaaagtgctgggatcacaggcgtgagccactgcacccggcccttttttgtatttttagtagatacggggtttctccatgttggtcaggctggtctcgaactgctgacctcaggtgatccacccgcctcagcctctgaaaagtgctaggattacaggcgtgagccaccatgcccggcctccttttttttgttgagatgcagtcttgctctgtcgcccgggctggagtacagtggtgcgatcttggctcactgccacctccacctcctgggttcaagcaattctcctgcttcagcctcccgagtagctagaattacaggtgtgtgccaccatttccggctaatttttatatttttggtagagacagggttttgccatgttggccaggctagtctcaaactcctggcctcaggtgatctgcctgccttggcctcccaaagtgctgggattataggcatgagccaccgtgcccggcccatgcttattattcctattccaaggctggtaagaaggcaaggttcggtttgggtgttgggggggtgcggactcagagctcctggttcctagtttagggtaccctcctgatgaaagatgataccacataagtatgattaaaagcatggaggccgggtgcagcagctcacgcctgtaatcccagcactttgggaggctgaagcaggtggatcacctgaggtcaggagttcgagaccagcctggccaacaagacgacagcccgtctctactaaaaatacaaaaaattagccaggcgtggtggtgggcacctgtaatcccagctactcaggaggccgaggcagaagaatcgcttgaacccgggaggcagaggttgcagtgagctgagatcatgccactgcactccagtctgggcaataagagcgaaactccatctctaaataaataaataaataaataagcatggagccaggctgggtgcggtggctaacgcctgtaattccagcactttgggtggtcgagacaagaagatcgcttgggcccaagaattcaagacccagcctgggcaacacagcaagactctatatctacaaaaaaatatatatgtacaaaaaactagccgggcatggtggcgcacatctgtggtcccagctattttggaggctgagatgggaggatcacttgagcctgggaggttggggctgcagtgagctgtgatccagctactgcattccatcctgggcaacagagcaagaccctgtcccaaaaacaaacaaacaaacaaacagcttggagccctgccgccagagttcaaattggactcttcctctttctgcactatagctaaggggcattatagctaaggggcttcacttctatgagcctcagttttctcaccaggaaaatgagacaataaaagtttctacctcatggggttgttgagaggattcagtaaattaatatttaaacacaacagcgcctgacatagggtaaggcattcagtaaaaggtggctgtaatttgcattaaatttgcctcatctcagtgggggcatttagggaaggttataaatgtgtccggaggccaggcccagtggctcacgcctgtaatcccaccactttgggaggctgaggcaggtggatcacctgaggttgggagttcgagaccagcctggccaacatgacaaaccctgtctctactaaaattacaaaaattagctgggcgtggtggtgggcgccagttcactccagcctggatgaaagagggaaactccattaaaaaaaaaaagtgtctggaaagcttggagtttcaatgtgagtcctggcaagtcgcttctccctcttttcttcagccaggcaatcactaaacctcagcctcagggccccagcctaggtctggcactctcctttcccctcccacctgggtccctggatgtcccagtttcctcaaggctcctaagtaccacttccacaggcagcctccttttctgcacagagcctctccagggctcccccgtgccctcaggaaagtctcagtccctttgcacgacccgctctgtcctgcgtgggctggctctgccgctttcacagccccatgtttgccacttcccccggcaagttaaggacatatttgcagttccttgaatagaacatgtcctcatttcactccaggcccctgcgcaagctgtatactctcatcacacagcatttgcacgacttgctcaacagcactcagggttccccttctccaagaagctccccctgactccccagcctgggtcagacacccctctgggctttgtcatgacagccctgaccactctgggttgtcactgtctggaaaggtggagggatctgtctctctcactagactgggcatttgctcttttttttttttttttttttttttgagacagagtcttgctctgtcttccaggctggagtgcagtggcgcaattttggctcactgcaacctctgcctccagggttcaagcgattctcccgcctcagcctcccgagtagctgggactacagttgcatgccaccacacctggctaatttttgtatttttaatagagatgcggtttcaccatattggtcaggcaggtctccaactcctgacctcaggtgatccacccgcctcggcctcccaaagtgctgggattacatgcatgagccaaagcacccggactggactgggcacttgtgaggacagctttcttcattgctggaggcacaccaccatggaagagatctaggtgggggacctaagtagtcagcctgtttgatcttgaggacacgggaaccccccccccaccccaagagatctgtgaagtgtctagggcagagcctgggtggtgggtggggcatggagaccctaccggtccttgtgtagtttcagaagcctcttcacatcttctctgcccttggggaccgggccggccttatcaaaggcctccttcaggagctggctcttctccaggccgaagacatgacggggagcaggccctgtggcagcgggtggaggaggcagtgggagcggtgggggaacaggggtctgctgactccagggaggggatggtaaagctgaaaagtccaggggacttgggggtagaggaggagatggaatgctgctggcttggggtacaggggtttttggaggagaaattggtggttttaggggaggagagcatggagaagtcattttggggtctacaggaggtgttgagaggttcagaaagcggggagggaaggatcctccaacggagaacggtctcagggatggagattttaaaggtttaagagctgagttccagaatctggggactgagcagtgggtgtgaaaggaccagggctaatatttgaaaccacgggagcaggaattgcgaggctgactcaagtcataaggcacctgacggttaacagggtggggtccttaaatccggaaccggatctgtggtaccggttgggttacctcgggagtcttaggtggagagttagtaggagttaactcattctttggggctggatgtggaaactcatgagtgagtttgggatatgaaggctcagatctagagtgaggtgccttaaggatgcgacttagggacccagggctaaagattcggagaacttaggttcagtaccccctcacatcccaggcccgagttcggaacctttgagctgacctttgagtcagaggtcaagaggtcaaaaaggacacctggcagggaaaatggcctagttgtggagaaggtcctggaaccagagcaacaaaaaacgtctgtgggttggagaagactcagagatcagaggccggtgggcgccgcgataaccactggaaaaaggaaaggagtcaggaagtaaagtgcacctcccactcccggaaaatggcggcccccgcacactgcctttcccatatcacgtggtattacacgcaacagttcccgcccattttgcgatcacgtgacagaaaacgcagctctggcgggggtaagaggcgggactccaaaaaggattgcctccggaagacaccgcagcgcgagacgcgtacagactcgtgaccttcactgattggtccgtagacccgggcgccacggaaggaggtgggctttcagggagtggggcggggtttttctacctaggcgggaacccaaatatcgttttgattggcaacagctgagcccagaaacgagacttgctctgattggtcaagctactgcgtttccgcgcggcgattggctggcagaaaggcagaggcggggccaggagagaaagctttgtggtttggtctcagggaagtagcaggcgccggttgagagaactacggccctgtcggaaggtaacctccggtgcaaacgaccatcggcggcaggcgagcggtacgcttggcgtccgggccttcctgggcccgtctgaggaaacttgctgctcgaggccaggctgcctaggacctgtcccttttttctatactggctcccacatccgggttttttctccgggacggcccttcggatgcttgggccaatgggaatcgccatttagggtgctccgcccaccgggtcgcgtagagcatcctggaagtcgtagtaaatctctcgagagttctctccgcacgcgggctggagaagcgggtcctacgcacgctttgttgtcgcgctttgcctccgtccttgcccctactcccgccttacctgacttccttttcggaggaagatccttgagcagccgacgttgggacaaaggatttggagaaacccagggctaaagtcacgtttttcctcctttaagacttacctcaacacttcactccatggcagttcccgagacccgccctaaccacactatttatatcaacaacctcaatgagaagatcaagaaggatggtgagttctcgggatagtccggagtccagactgtcccgcacgggctggcccctcttccgtcccctgcacccgcctctctttctaagtgtttgtccagccaaacttcgagttaactccttggcctttacacaaactacttcctgtcttcaacactccattagttcatcttacactctgccctttaacgtggtcactgctgctcatcttacaaggtttgaggtcacaggacccttcctccaggaagccttgccttgtcccttcacgtggctgccgctgacttgccgtacgctgagaccatctcccatcaagccctgattcctctgagctgtcgtggggctctctctcctcccagtggcctttgaactccgtgagggcaaggactggggctttcttggtcaccggctttttcagtgatcagcccacaatgaacatgtaccataatggtggctaacgctctgtatcatgggctggtctgtgtgctttcatataaatcttgataacatttaattctcacaacaatcttgtaggaagaaggctattgttattcccattcgtcaactaagaaactggggccgggcgcggtggctcacccctgtaatcaatcccagcactttgggaggccgaggcgggcggatcacctgaggtcgggagttcgagaccagcctgaccgacatggagaaaccctttctctactgaaaatacaaaattagccgggcatggtggcgcatgcctataatcccagctactcgggaggctgaggcaggagaattgcttgaacccaggagacggaggttgcagtgagccgagattgcgccattgaactacagcctgggcaacaagagcgaaactccgtctcaaaaaaaaaagaaagaaaagaaaaagaaactgagacaggggtgatgtgacttgcccagggtcacatagcaagtaaagtggttgaggccacccgtatagaattctgcttaggaacccaatttttggccgggcgtggtggttcaggcctgtaagcccaacactttgggaggctgaggcaggaggatcactgaaacacaggagttcaagatcagcctaggcgacaaagccagaccttttctctacaaaaaaaaaaaaaaaaaaaaaaaaggctgggcgtgggtggggtgcgtctgtggtcccagctacttgggaggctgaagtgggaggatcgcttgagctagagaggttgaggctgcagtgagctatgattgcaccactgcactgctgcctgggctgagcaagaacctatctgaaaaaaggaaaaaaaaaaagaactcaattattgaaatcggaaagactctctcacattctcaagtaaattatcacctttattgaacctcattttccagatctaaaaactgagcaaaatcataataccttttttgcatggatgttgggggagattaaattagctaaaccttgcagtatttcttttttatggtaactggcagctagtaaagggctggataaatgttagctcttatcacttcaagaaaattatcgggagaaccgaaggagcttgttgggattcagtttgaggttaccagtgaagttgctgttgaagaaagcaaaaccagcagccgggcactggctcacgcctgtaatctcagcactttgggaggctgaggtgggcagatcatttgaggtcaggagttcaagaccagtctggccaagatggtgaaaccccgtctctactgaaaatacaaaaatcagctggatgtggcggtgcgcacctacagtcccagctactcgggaggctgagcaggagaatcacttgaaccctgggaagcagaggtcgcagtgagctgagaccgcaccactgtactccagcctgggtgatagagactgtctcaaaaaaaaaaaatcaggagtgtaaattttgcatatgttttttttttttttttttttttttttttttgaggcagagtttcactctgtcacccaggctggagtgcagtggcacgatcttggctcactacaacctctgcctcccaggttcaagcgattctcctgcctcagcctcccgagtagctggaattacaggcacccgccaccacgcctggctaatttttatatttttagtagagacggggtttcaccatgttggccaggcttttctcgaactcctgaccttaggtgatccgcccacctcggcctcccaaagtgctgggattacaggtgtgagccaccacacccggcctgcatatgtttttagagtgtggtgcccaaccattatcgggcagtgctggggacacattggtgacatagaaccctggttttttgtttttaaatcttattttatttatttatttatttttgagacggagtcttcctctgtcgcccaggctggagtgcagtggcaccatctctgctcactgcaagctctgccttgcctcctgggttcacgccattctcctgcctcagcctcccgagtagctgggactacaggcgcccaccagcacacccggctaattttttgtatatttagtagagaaggggtttaaccatgttagccaggatggtgttgatttcctgacctcgtgatctgcccaccttggcctccaaaagtgctgggattacaggcgtcagccccagcgcccggcgttttttttttttttttgagatgagacggagtgtcgctctgttgcccaggctggaatgcagtggtgcgatctcagctcactgcaacctccgcctcccgaattcaagtgattctctgcctcagcctcctgagtagctgggattccaagcacctgctaccacgcttggctaatttttgtatttttagtagagacggggtttcaccatcttggctatgctggtctcgaactcctgaactgtgatccacccgcctcggcctcccaaagtgctgggattacaggtgtgaaccaccgcacccggccagaaccctggttctttaggacagtgacagcccagagtagtcagggccatcaggcaggaagcttaggcagagtgttgagggctgggattgggaacttagaaagacagagagatccattcagcttccaggaaaaggagacattttggagagcctgccaggtacagtaagcagtatttatgttacactgagggagaagagcattcttaacttggtccagcttgttcagatgtttagggtcaaaagagcctggcgtattctgagtattacaagtagttttgaggcttgtaaatcatggggaaacttccagtgagctgtgcactggtggctcatggctgtgaggtgttggactttgccctgagggtgttggggagccagactgcttccctgtcctggctgcctccctggtggaatatcctcccagctgtggagggtaaatgcgaatgggcgaggggaggctggagagtagagagaggcccagagtcccgtggaatgagtgaagtctgagcaagattcatggggatggagtacggagaggaaaaccagaaatgtcaccaccaggagaatttttgactaattgcttaaaaacaaccttgactgctgtccctgcccccacccagcctacacattttcttgcttctttcctagcctggtatctattttacaagtggcttctgcttcagcttagcttttttttttgagatggagtttcgatttgtcacccaggctggagtgcagtggcgcaatctctgctcactgtaacttttgcctctctggttcaagctattctcatgcctcagcctccccagtagctgggattacaagcgccctccaccacgcctagctaattttttttcttttcttttttttttttttttttttttttggcatttttagtcaagacggggtttcaccgtcttggccaggctggtcttgaactcctgacctcacgtgatctgcctcagcctcccaaagtgctggaattataggcatgagccaccatgcctggccagtttttatgaaggttggagtccagtggtgaggtcatggctcactgcaacctctgcctcccaggctagagtgatcctcccacttcagcctcccaagtagctatgaccacaaggcatgcaccactatgcctggctaatttttgtatcttttgtagagacagggtttcaccctattgcccagactggtcttgaactcttgagtgcaaaggatctgcccacctcggcctcccagagtgctgggattacaggtgtgagccaccatgcttggccatctcagccatcttctttgcataagacattggtgccctttgcagacctgggtggtgagagggagtccatccttgttgagcttgaatctcacttgctgtcaagtgatgccctttgctggtgagatgtggtggtaccgggttcagatggaatacgtggactgggctctgccatacgcttccttatgccctccagattgatgccctgggccagtgaggaatcctctgagaacctgtttccagtaaaattgggacagtcatagttgccacctaatgggtttgttgtgaggaagtgaagttacctccataaagcatttgatgggggtgcgatgactcatgcctgtaatcccagcactttggggaagccaaggcaggaggatcactggagcccaggagttcaagaccaacctggccaacataggagactgtgtctacaaaaaataaaaaattagccgtgcgtcgtgctgcgtgcctatggtcccagctccttgggaggctgtggtgggaagattgcttgagcctgggaggtcaggcctgtagtaagctaccatcatgccactgaactccaccctgagcagtagaaggagattctgtctttaaaaaaaaaaaaaggcacttgatggtatctagtcaaatgtttgcagccaggtgtggtggcacactcctgtaatcccagcactttcggaggccaaggtgggctaattgctgaagctcaggagttcaagaccagcctgggcaacatagcaagaccctgtctctgcacaaaatccagaaattagctgggcatggtggcatacacctgtggtcccagctactccataggctgaagtgggaggaccgcttgagtccgggaggttgaggctacggtgagccatgatcatgccactgcactccagcctgggtgacaaagtgagaccttgtcaccaaaaaaaaaaaaaaaaaattgtggtggagtctgtgctaggcttggcatactgcagtaaacaaatgggacaggcttatagctcctcaggcaagatagacaagttaacgtaccatgacaggaggtgggaaatagtcatgaaagaaaaggaagtagagtaagaatgacatgggaagaaatttagacgtcgtggtcagaggtggcaacatttcctctgagactgggtgactagaaggaggccaccatgtaaacctcaggggagggatgttccaggtaaagagagcagccagttcaaaggccctggggcaaaattggtgtgtcagacctgggggccagtgtggttgggaactcaggagggcggtggaatgtgggcagggatgaggtgggggaaatctgccagggccacgtcatgcaggcccatgtcagggtgctggtggcagtgaaaagaatcactcatttatcgagtgtttactacgtgccggatgctgtcctgagcactttgcatgtatgtgcacatgttcattatatagcagctctctgtaagcacatcttacagaagagtagaagagtgtacttggccacttgagtggttcctggctgcttctgtgattgttaggtcttgagagattatggacccgaggcattctgggtaccccatcaattggctgatggtcttctatttgggctgcgcttcttctaaaaaggggagctcaaaggtctttttttcccccactgcagagctaaaaaagtccctgtacgccatcttctcccagtttggccagatcctggatatcctggtatcacggagcctgaagatgaggggccaggcctttgtcatcttcaaggaggtcagcagcgccaccaacgccctgcgctccatgcagggtttccctttctatgacaaacctatggtgagcattgcgggtacggaggctgtgtgggtgtgtaaaatgttataggagactgggcgggcctggattagaggaggggatattacggttcatttgccaaggtgaggctggaccaggctcccactgcaccttgcctcatttaaaaatcttttctttggccgagggcggtggctcacgtctgtaatcctggcactttgggaggccgaggcaggtggattacctgagctcaggagtttgcagccagcctgggcaacaccgtgaaaccctgtctctactaaaatacaaaaattagctcggtgtggcagcatgcacctgtagtcccagctactcctgtggctgaggaaggagaattgcttgaacccgggaggcagagattgcagtgagccgagatcctgccactgcactccagcctaggcaacagagtgagactctgtctcagaaaaaataaataaataaataaataaataaataaattattttgagacagaatcttcctctgttgcccaggctggagtgcagtggtgcaatcttggctcactgcaacctccacctcccgggttcaagtgattctcctgcctcagcctcctgagtagctgggattacaggcacgtgccaccatacctggctgatttttttatttttagtagagacggggtttcgccatgttgcccaggctggtctcaaactcctgagctcaagtgatctgcctgcctcagcctcccaaagtgctaggattacaggcgtgagctactgtgccacactaagaatctttaacataccttcccctactgaataagcaccatgaaagaggggtttttgtctattttgttcattgctttattcccagagccttgaatggcgcctggcatctggcaggttctccttaaacagctaagtgagtgagattgaacctggaagactgaagtattcttgtgtgacaggaaatccccctgcactgcactcctctcctagcattgtctcctcggtcctttggcctgatgtttattgctgttccagcttcccttaaaaataccaacagcctttctactgaacacttgcttactgtgtgtcaggtactgttccaagcactttaactcatttagtcctcacaacagtcctttgaagtgggaagtatcataatccccatttttcagacaaggaagttaaggccaagatatttctgtgtttctcagtaagctcctgataaggtctgaatttttttttgtttgtttgttttttgttttttgttttttgctctgttgcctgggctggagtgcagtggtgccatctcagctgactgcaaccttcgcctcctgggttcaagcgattcttctgcctcagcctcttgagtagctgggactacaggtgcgcaccaccatgcccagctaatttttgtatttttggtagaaatggggtttcctggccaggcgcagtggctcatgcctgtaatcccagcactttcggaggccgaggtgggtggatcacctgaggtcaggagttcgagaccagcctggccaacatggtgaaaccctgtctctactaaaagcacaaaaattagccaggcgtggtggtgggcgcctgtaatcccagctagtagggaggctgaggcagaattgcttgaacccgggaggcagaggttgcagtcagctgagatctcatcactgcactctagcctgggtgacagagcaagacaatgtctcaaaaaaaaaaaaaaaagaaaagaaacaaagaaatggggttttgccatgttggccaagctggtctccacctcctggcctcaagtgatctgctcgctttagcctcccaaagggctgggattacaggcatgagccgcagcacctggcccctgataaaggtccaattttgaatcttggcaattgggctctgaatccacgctcttaacccgttctgctctctgtttggtagcgtatccagtatgccaagaccgactcagatatcattgccaagatgaaaggcaccttcgtggagcgggaccgcaagcgggagaagaggaagcccaagagccaggagaccccggccaccaagaaggctgtgcaaggcgggggagccacccccgtggtgggggctgtccaggggcctgtcccggtaagccaggtcccggagaccaaccctcccactgccagaccttcctcagccacatggactggctttgggacagggtggggagagttctccccttggggcttcagacccctcctttccatttctttatagagatgtgtttctctctctcttttggggggtattgagcacctagatgatgctatctcctttcgaaactcttgttccctccttgtgactgtttctcaaggtctttcttcatggctatgacttggtttcgctctctccgtggccttgattttgtcgcctgtgtcttgtaactcattgtgcatgtagaaaatccaagtgtctactaagcaactgttaggattaataagtgaacttaaatttagaaagatcgctggatataaaggcaatatggaaaaaaattagttttatttatttattcatattatgttttgagacagggtctcactgtcacccaggttggagtgcagtggcgccatcacagctcactacaacctccgcctcccaggctcaagtgatacgcctcagcctccctagcagctggaactgtcagtccgtgccactccacccagctaacttttgcattttttgtagagacggggcttagccatatcacccaggctagtctcaaactcactgtctcagcctcccaaagtgctaggattacatgcatgagccaccatggctggcccccagttttatttttatatgccagtaacagaccagtagacttcacattgaaaagtagcactgaggggtaaatccaacaaaaggtttgcagaacgactacactgaaatcacagaatgtagctgggagaaatcagagactcagcaatggataggaagactcagtattgtcaagaggtcagttccatccaaattaattgaagattcaacgtgattgcaatcaaaatcccaccaggaatttcggtaaacactggacactgattggctctttctaaatgtgtggaaagacaaggccaagccaggcgaggagaataaagcaccaggacctgcatgaccaggggaagctccagcaaccaggccaggcccaatggctcatgcctgtaatcccagcactttgggaggccaagataggaggattgctttaggtcaggagttcaagaccagcctctataaaatagcaagacctcatctctacaaaaaataaaatagaaaactgggcgtggtgactcattcctgtagtcccagctgctcaggaggctgagctgggaggatcgcttgagaactggaggtcaaggctgcagtgaacagtggttttgtcactgcactccagcctgggtaacagagtgagaccttgtctcttttttgttttgttttgttttcttttgttttttttcgggagggagtctcagtcaatctgtctccccaggctggaatgcagtcgtgcaatctcggctcactgcaacctctgcctctcaagttcaagtgatcttctgcctcagcctcccaagtagctggatcacaggcacatgccaccacgtccatgtgcaaaaaaaaaaaaaaaacctgcagcaaccaaccaggatgatatacagttggcagaagggtaggaagacagaccaaggggacaggatgaagagtctaggtacagctacacttgtataattacttgatgtgtgatcgaggtaccactgcacttcactgaggaaaggactttttttcccctagttcatgatgcggggcagttgggtatctgcaaggggaaaaaattagccctacctcatactatatgcaaaatataacttgaagtgaattgcagatccaaatgtgacaactcacaaaatatagtttcttttctcttttcttttctttttctttttcttttttttttttttttttttttttttgagacagagcctcgctctgtagtccaggctggagtgcagtggtgtgatctcagctctctgcaacctgcgcttcctgggttcaagcgagtctcctgcccctgcctcccgaggatctgggactacaggcatgtgccaccacacccagctaatttttgtatttttagtagagatggggtttcaccatgttggccaggctggtctcgaactcctgacctcaagtgatccgccctcctcaccctcccgaagtgctgggattacaagcgtgagccactgcacccggccctcacacaataaagtttctagaagaaaacaggaaaatgtctaaatgaccttggtgagggcatgaaaagtggaaacatcctgttttccaaacaggatacaaaaagcaccgagtacaaaagaaaagatggatgaaccaggcccactccttaggtctctgagcctccgtgtctctctggctttcatgagtctcatggctctgactgggtcatgctctattcggtgccactcacactttctccaagttggtgatggtgtctggattactgtgggctcctgttaacctctctcctcttccctgcacctagttttctgtccactttggacttcagattgtgattccagcccctgagtgtgctgcctgccatctgttgtcttccctcttccccttgctgccacgcgttttgttctgcacctgccctgagtgtccctttccatcactgccctcctttgtttttgtttttgttttttgagacagagacttactctgttgcccaggctggagtgcagtggtgtgatctcggctcactccaaccttctgttgccgggttcaagtgattctcctgcctcagccactctagtagccgggattacaggtgcccaccaccacgcctggctaatatttgtatttttggtaggggcggggtttcaccatgttgcccaggctggtctcaaactcctaacctcaggcgatccgcctgcctcggcctcccaaagtgttaggattataggcgtgagccatcgtgcccggcctaccacacatttctttctgcacctgccctgactgtccctttccatctcttcctctcctttgattttgtttaagagacagggtcttgctctgcctcccaggctggagtgctgtggcacaatcagagctcactgcatgcagtcttgacctcctgtgctcaagtgatcctcctacctcagcctcacaaatagcatttaactctttctgatttaatgtcccactagaccctgggtttgttttgctctgtcgggccctctttgggtgccttttgcgcctctttctgggtgtttttccttacatctctcacccgctaggtttcctttcatggcctcttctctgcctcctggggctgctgtaaccacgcactctcctccctctctccacagggcatgccgccgatgactcaggcgccccgcattatgcaccacatgccgggccagccgccctacatgccgccccctggtatgatccccccgccaggccttgcacctggccagatcccaccaggggccatgcccccgcagcagcttatgccaggacagatgccccctgcccagcctgtgagtatctagtcccacccaccaggtctcatataaatagtgagaatacaggactagaaagggaccagttggggggctgctgtaggttgggtggtctgggcaggccccctgaggaggtggtactgaatgaggaagtagcagtgggggtgggccctgggcagaggaattggcatgctggttggagggtacggaaggttagggtaggctggagtggtgccagcacctagattgattccatgagctattgagcgcctccttacgtgccaggccccgttctgcactgtagggctgcagcagggactgagatagaaacctctgctgtcctgtggcctatagtctgtaggggcaaagaggtgggaggcagacaggcaacagacaacaatatgtggtatgttgggtggaagtaccagagtgaattcaagcagggtgagggatggaggaagtggcagtactatgggtctcccactggactcagggctcttgtgctcaccgactcccctatacccccgcagctttctgagaatccaccgaatcacatcttgttcctcaccaacctgccagaggagaccaacgagctcatgctgtccatgcttttcaatcagtaagtggggcctgtggctgggtggtccctggagggtgatggccaggaggcatctccatggaaacaggcctcagaactctgccagcagagctctgagccaagtagggctttgcagaagggacagcgaccaaagatgtgaaaggaggaggctgtggctgggcccacggcctgtgggggacatgggggtgaggctggaaaggtctccatggccagggcttgccggcttttttcagccttgtttgagggctgagggagtccaggctctgggcctcattttcccagcccctaaaatgggggcatgcaaggcaaggtatgtgtaaaactgcattgagatgtccttgaacattggctaagactggcagaagtcagcgtgctcagaaacagcaagtgtgggagatggggatgcgtgaaactcttgtgcctggcgtcagggtggaggccggtgcagccgatgtgtagaggggctgttcaccattgttgagtgaagtcgtgggtgtgggtgagttcatctggtggttctgtttcaggggctgtgagtggggcattcgtcagtgtttgtggtggggagttggagggtgtctgggagaagggatggctacatgcagcatctcaccatgctgcactgcgtggcacttagaagaacagaaagcgcaactttataatagtgccgagagaagattgtgagaacctgaaaaatacagaaaaacaataccacatgtgcagcctgtccacaaagctgtatattttgtgagaatgccgatggaaaaaaggatacctagtaaacatgaggatggctgcttaatggagaaagaagtatggaatgagaagagggaaattagagaaacagcatatcagaaaagtgagggtaaggccgggtgcggtggctcacgcctaaaatcccagtatgttgggaggctgaggcaggtggatcacttgaggtcaggagttcgaggccaatgtgggcaacttggtgaaaccccttctctcctaaaaatacaagaataaaaatggaaaaagtgagggtattggttatttttttggtgtggcgggtgggttatgatttaggaagggcccaggagactgcggtgtactgtttcttgatttaggttgcagttgcatgggtgtttgtgtttaaatttttcattaaatgctatgtttacattagagtttttcaacttagtactatctgcattttgggctggataattctgagtaatggggccctgccctgtgcattggaggctatttggcatcatttctggcctctgtccacttgatgccgttacgttagggggaaatgctgagtccctgaggtctgtcgttctctttcaggttccctggcttcaaggaggtccgtctggtacccgggcggcatgacatcgccttcgtggagtttgacaatgaggtacaggcaggggcagctcgcgatgccctgcagggctttaagatcacgcagaacaacgccatgaagatctcctttgccaagaagtagcaccttttccccccatgcctgccccttcccctgttctggggccacccctttcccccttggctcagccccctgaaggtaagtccccccttgggggccttcttggagccgtgtgtgagtgagtggtcgccacacagcattgtacccagagtctgtccccagacattgcacctggcgctgttaggccggaattaaagtggctttttgaggtttggtttttcacaatcatttgtctgtctgattttcttgctcttcatggttcctttccctccacctcagcagcacatcctgggtttttggacctcttggcattttgaggtttgcaaccttggggaaacataggatagtgtagtaatattgttcaaactcaggttacaatgactactttggcagttttgtatgttgtcccaattcacagcaggaaatggaatcctgggtcaggaaatggaaagtcagggctgccgcgtacagttaggcaggatgggtactgcacaagaatggcaccttttaagggcacaccattcactttgtaggcttacaagtttatgccaccacttttctaacagatgacaagagtgttcagggagaggtgtttcttcaccttttttttactcttctcaaaagtgcagcctgttgtagcaatggccccagagaaaccacagtaggtagttcaaacagaaaggaatttaatacaggaaacttggtgctgctgaaatcatggggcgtgtgggtggtaggagtggcggtctgggtttgagactcttgagttcgagtttgcagcccccgaatgagctcctagctagagttcagcgggatgccactctggcttccggcagtgcctggactcatttggtcactcctgggaagctactgacttgatgctggtatgaggggtgtggccgcctcacacacaggtgatctactttcctggccagtggccagccaggagcttcaggcaggtgcctgaccccaattcccctgcagtgtctagctgcagggaagtctaggatatgtgacttctggctgtacagccacaaacccagctgcagctctggattagaaagggagattgggcagggtggctcacgcctataatcccagcaccttgggaggccgaggtgggcagatgacgaggtcaggaattccaaaccagcctgaccaacatggtgaaaccccgtctctattaaaaatacaaaaaaaattagctgggcataggggtgcgtgcctgtaatcccaactactcaggaggctgagacaggagaactgcttgatcccaggacggggaggctgcagtgagccaagattgagccactccactccagcctgggccacagagcgagactcaaaaaaaaaaaaaaaaaaaaaaaaggttgagtcaggcgtggtgtctcacacctgtaatcccagcactttcggaggccgaggcgggcgcatcaccagcggccaggagttcaagacaagcctggccaacatggagaaaccccatctctactaaaaatacaaaattagccaggcgtggtggtgtgctccggtaatctcagctacttaggaggctgaggcagaagaatcatttgaacccaggaggcggaggttgcagtgagtcaagatcgtgccattgcactccagcctgggtgacagtgagactccgtctcaaaaaaaaaagggaagggagattggttggggggaccatccttaggagtttgtcacatccctgtcctggggaattttaaattgaccaaaaataatatgcacatggcccggtgctgtgactcacgcttataatcctagcactttgggaggccgaggtggacaggttgtctcagctcaggagttcaagaccagcctgggcaacatggtgaaaccccatctctattaaaaatacaataaattggccaggcgtggtggttcattcctgtaatcccagcactttgggaggccgaggtgggtggctcacctgaggtcaggagtttaagaccagcctggccaacatggtgaaaccccgtttctacaaaaatacaaaaatcaaccaggcacgggtggcgggtgccaatcccagctactcgtgaggctgaggagggagaatcgcttgaacccgggaggtggagattgcagtgagccaagatcacgccattgcactctggcctgggcaacagcaagaatctgtctcaaaaaaaaaaaattagctgggcatggtggtacacacttgtcccagctacttgggaggctgaggcataagaattgcttgaacttgggaggcagaggttgcagtgagccgagattgcaccactgcactccagcctggatgacaaaaagagtgagactccatctcaaaaaaaaaaaaaaaaaaagtgtgtgtgtgtgtgtgtgtgtgtatatatatatatatgcgcatgcgcatattacttaagaccctttctcacaccaggtacatggaaaaaggcaatcttttggcaaaaagtagatctaccactaaatacagtaggccaggtgcggtggctcacgcctgtaatcccaccactctgggagccaaggtgggcagatgacgaggtcaggagatcgagaccatcctggccaacatggtgaaaccctgtctctactaaaaatacaaaaattagttgggcgtggaggcgcgtgcctgtaaccccagctacttgggaggctgaggcacgagaatcgcttgaacatgggaggcggaggttgcagtgagccgagactgcaccactgcaatcaaccagcctggtgacagtgagactctgtctcaaaataaatacatacatacatgaatacagtaaaacatactaaatttttccttgttttttgagatggagtcttgctctgttgcccaggctggagtgcagtggcatgatctgagctcactgcaacctccgcctcccaggttcatgcgattctcctgcctcagcctcctgagtagctgggactccaggcacccgtcaccatgcctggctaatttttttttttttttaaggcggggttttgctcgtcacccaggctggagtgtagtggcgcgatttctgctcactgcaatctctgcgtcccgattctcctgcctcagcctcctgagtagctgggattacaagtgcatgccaccacacctggctaatttttgtatttttagtagagacagggtttcaccatattggccaggctggtctccaactcctgacctggtgatctgcctgccttggcctccaaaagtgctgggattacaggtgtgagccaccgcgcccgggctttttttttttcttttttgagacagagcctcactctgtcacccaggctggagtgcaatggcatgatcttggctcactgcaacctccgcctcctgggttcaagcaattctcctgtctcagcctcctgagtagctgggactacaggcacccgccaccatgcccggttaatttttgcatttttattagagacggggtttcaccaagttgaccaggctggtctcaaactcctgacctcaaatgattcacccacctcggcctcccaaagtgctggaattacaggcgtgagccactgtgcctggctaaacatactaaattcttattttcctgccaaggctctaggcccaatcctgctcatgccctgctctccctgttcacgaggaatgtcaatattaaaagcagtgaagatacagggcaccccatgcagacctcctccacttgtgatgggaaagatgggaacgacaggaattgccctctgcagtaaatgacgtttattgctgacaggcaaggggaaacatctcgcccaccatactggcaaccacaggcctactggctattaagtatgtgcgttccgtggtcagctggtcctggtttctgctttctggggacttcatagctgttagcccatgggcagttgatgtccccagtctgagttttgtttacttcctgtgtaaagagtagtccctctatattaataccatgatgatgtttgtactcattacccatcccctagcacacactctctccctttcagtcacttagcaagcactcaataagttcagcaaatatttgctgggtacctattgtgtgctgcatacttttgtagggacaaggtatgcagtgattaataaaatagagaatttccagtattgtgttgtgatgaaaacaaaactgatgtggtggggccagcatactgagaggccgaggtgggagggtcgcttgaggcaaggagaccaacctgggcaacaaagtgagacctcatctctacaaaaaaaaaaaaaaaattaaaaattagccatgagtggtggcatgctagttgggagcctgacccagggggttcactggagcccagttcaaggctgcagggagctatgatggtgccactgcactccagcctgggtgacagagtgagaccccatctccaaacaaaaaacaacctaggctgggccaggcacaggggctcacacctgtaatcccagcgctttgggaagctgaggtgggtggaacacttcagatcaagagtacgagaccatcctggccaacatgctgaaacactctctctactaaaaatacaacaacagccgggcgcagtggctcatgcctgtaatcccagcactttgggaagccgaggcgggcggatcacgaggtcaggagatcgagaccatcctgactaacccggtgaaaccccgtctctactaaaaatacaaaaaaattagccgggtgtggtggcgggcgcctgtagccccagctacttgggaggctgaggcaggagaatggcgtgagccattcgggaggtggagcttgctgtgagccgagatcgcgccactgcactccaaaatccagcctgggcgacagagcaagactctgtatcaaaaaaacaaacaaacaaaacaacaacaacaacaacaaaattagttagacgtggtggtgcatgcttgtaatcctagctacttgggaggctgaggcaggagaatcacttgaacctggaggtggaggttgcagtgagatggaggtgcagtggcactgcacactccagcctgggtgacagagcaagactccaaaaaaaaaaaaaaaatcctgatgtgaagcgggtgatggggttgggaacagtaatgagtggtccagaaaacccttctgagaaggtgcatttgagctgagctcatggtgcttggtgttgggtttgtagacatggcacagacctagtcttcatccctgacaaactcttccctggccccaagcctgtgtgtgtccatcctcttctaaaaaaagcttggacttgccagtctagaggtgagggtccctgggagcaacgtggaccctctggagaaggacgcttagcctgtggatctccgaagcacactttggaggtgagagatgaaaaaaaagaggccgggcacggtggctcacctctgtaatcccagcactttgggaggctgaggtgggcagatcacttgaggtcaggagatcgacaccagcgtggtgaatatggtgaaacccgtcgctactaaatatacaaaaattagccaggcatggtggcacgtgcctgtagtctcagctacttggaggctgaagcagaattgcttgaacccgggaggcggaggttgcagtaagccgagatcatgccactgcactccagcctgggcgacagagtgagattctgtctcaaaattttaaaaaattaaaaaaaaaaattgtgcttctcagtggccctgctcctgtggctgcaatatggaggaagagtacaaagggtgggtacaaagactggcctctgtcttgctgttgggaaatccagctgccacgttgtgagcttgtgtctggaattggttccttctggtgggttcttggcgtcgctgacttcaagaatgaagccatgcaccctcgcagtgagtgtcacagttcttaaagatggtgtgcctggagtttgttccttcagatgttcagatgtatctggaatttcttccttctggtgggtttgtagtctatgctgagttcaggagtgaagccacagaccttcgcggtgagtgttacagctcataaagataatgtggacctatagaatgtgcaacagcaaaatttattgcaaagagcaaaagaacaaggcttccacagcatggaaggcgccctgagccagttgcagctgctggctagggtggcctgcttttatttccttatttggtcccacccacatcctgctgattgatccattttacagatagctgattggtccattttacagagtgctgattggtctgttttacagagtctgattggtccgtttttacagagagctgattggtgcgtttacaaatctttacctagacacagagcgctgattggcgtgcttacaatcctttagctagacacagagcgctgattggtgcatttacaatcctttagctagacagaaaagttctccaagtcccctacctgattagctagacacagagcactgattggtgtgtttacaaacctttagctagacacagagtgctgattggtgcatttacaatcctttaggtagacagaaaagttctccaagtcctcaccggcccagaggcccagccatcttcacctctcaagctgtctgtagaggtccacgtgtcaagaaaactgaggacagaggccctcagtccagttcccacaagcaactgcatctccccaacagctgcctgaatgagtttggaagcagtcctcccaccattcagccttcagatgaaactgcacccctggctgacaggctgattgcagccttatagcagaccttaagcctgagacattcgacccacagaaaaggtgataattttggtctttttttttctaaacaggttcttgctctagagtgcagtggcacgatcatggctcactgcggcctctacatcctgggttcaagtggtcctcccacctcaacctcctgagtggctgggactacaggtttgtaccaccatgcacagctagtttttctctttttttcttctttttgtaggtacaagggtctccctgtgttacttaggctggtctcaaattcttaggctctagcaatcctcctgtctcagcctcccaaagtgttgggattacaggcatgagccactgcactggggcaatgttggtcttaggctaattatgcagcaggagatacatgcactgtgctttgggaattgaagtcacttctatttctttgtggcttcatcagtaatatggggcagggggcacggttcccacagctgattcttgagtgttctttctgagtatccttaatacttcacacactatcatatatctgaactttgttcattgattatctcccctttaattttcattccttgatgaatctccagggtctggattaagtcctaggatactttatgtactcatgaaatcttcaatgaatgaagaaatgattttttttttttttgagacagagtctcactctgtcacccaggctggagtgcagtggcatgatcttggctcattgcaacctccacctcccaggttcaagcaattcttctgcctcagcctcctgagtagctgggactacaggcatgcgccaccatgcctggctcatttttgtatttttcagtagtgacagggtttcaccatattggccaggctggtcttgaactcctgacctcaggtgatccacccacctcagcctcccaaagtgctgggattacaggtgtgagccactgcatccggcggatttttttttttttttttttgagacagggtctcactctctcgttcaggctggagtgcagtggcgtgatcttggctcactgcagcctccacctcccagtttcaagtgattctggttcggcctcccaagtagctgggactacaggtgtgtgccaccatgcctgtctaatttttgtattttcaccacgttggccaggctggtctcaaaactcctgacctcaagtgatccgcctgcctcagcctcccaaagtgctgggattacaagagtgagccaccatgtctggcctgaatgaagaaataattttttaaagagtgttttaaagtggggccgggtgcggtggctcacacctgtaatccccacacttttggaggccaaggtgggtgggtcacttgaggtcaggagtttgacaccagcctgaccaacatggtgaaaccccatctctactaaaaatacaaaattagctgggcatggtggcagatgcctgtaatccccgctacttgggaggctgaggcaggagaatcacttgaacccgggagggggaggtcacagtgagctaagatcgtgccattgcactccagcttgggtgacaagagcgaaacaatgtctcaaaaaaaaaaaaaaaaaaaaagaaattgcatttcaaagccaggtgcagtggctcacacttatagtcacagctacttaggaggctgcggtgggagaatagcttgagcccagttgttcaaggctgagtgagctgtgattgtggcactgcactctagtctgggtgacagagtgagaccctgcctgtaaaaaaaaaaaaatctttcaggccagacgcggtgactcactcctataatcccagcactttggaacgccgaggcgggtggatcacctgaggtggggagttcgagaccagcctggccaacatggacaaaccctgtctctactaaaaatacaaaaatagccgggcatggtggcacatgcctgtaatcccagctactcgggaggctgaggcaggagaattgcttgaactcgggaggtggaggttgcagtgagctgagattgtaccactgcaatatgagactccatctcaaagaaaaaaaagaaaaaaaaaaaaagatagcatagcaatggctgtgggcctggatacaagtcttagcctctccacttctccacttcctggctctgtaagccttagacaagttccttaactccacacttccatttccatgtaacaaggggttataggccaggcattggtggctcatgcctgtaatcccagtgctttgggaggccaaggcgggaggatacttggggacaagagttcaagaccagcccaggcagcacagtaagacattggctctagaaaaataaaaataaaagaaatcatccaagaatggtgacttgcctactattctactcgagaggctgagaggggaggatttcttgagcccaggagtttgaggatgcagtgagctatgatcacatcactgtacttcagcctgagcaacagcaagatcctgtctcaaaaaattaaattaggctgggcttggtggctcatgcctgtaatcccagcactttggaaggccatggtgggcagattgcttgagcccaggagtttgagacgaggctgggcaacatgacgaaaccccggctctaccaaaaaatacaaaaaattaactgggcataatggtacatgtctgtggtcccagctactcggtaggctgaggtgggaggaatgcttgagcccaggaaataggggctacagtgaaccaggatcatgccagtgcactccaacctgggcaacagagcaagactctacctcaaaataattatttaaaaaaatggattaattgggcataggtggcttgtgcctgtagtcccagttactcaggaggctgaggtgggaggattgcctgagtctaggaggttgaggctgcagtgagccgggatggcaccattgcactccacctgggcaacagggtgagaccctgtctcaaaaaagaaaaaaaagggaggggttataatcactcctcctgacatgatacagagtatccatttgagttcataacataaatatgtacttggtgaatgctctgtaactattggcttttttattgttcccattttacatataaggaagctgaggctttgtgaggagaaatagcttagcccaggtcatccagtgggaagcgtctggtgcagaggaatagtgatcatggtgggactttgcctagcctaaggttcagcatacaatattcagtcagtactcaagggctgggctgtttctggtaatcaaagggctgccttgttctcctgccccacagcacaggaaattccaaggtggttttctttacaggctcctccgcttctgtggccagaggggacagcggaggagcccaggtacctaagccaactcaagagaagatggaattgaatatttcaaccaccttatctaggcctctgtgattgttgaggagggggctgtcactgggaaagttgtgagctgctttggaccttatctgggaatttccttgggcttacagcctttaccctatccttgaaatggttctggtttcatagcaacttctaggtggtgtgggcgaagtttgggactggtttagggcggggacaagaccaagaacacaagtttccttgtactacgggagagagggaggggaggaaattggagaccccagcacccccttgctcactctcttgctcacagtccacgatggcccggtccctggtgtgccttggtgtcatcatcttgctgtctgccttctccggacctggtgtcaggggtggtcctatgcccaagctggctgaccggaagctgtgtgcggaccaggagtgcagccgtaagaatggggaggggagaattgggggcttgggcgttagcctgtgtggagggtgctgcattcccttctattccttccctagaccctatctccatggctgtggcccttcaggactacatggcccccgactgccgattcctgaccattcaccggggccaagtggtgtatgtcttctccaagctgaagggccgtgggcggctcttctggggaggcagcgtgagtcttgggagagtgaaagagggaagggtacagagctggggtagactcattatccccatgaagggaagatttgaggggggtgaactgaaatagacattgtggggggatattgttacttactttattttatttgcttattattttttaattttttccgagacagagtcttgctctgtcacccaggctggagtgcaatggcacgatctcggctcactgtaacctccacctcttgggtttaagcgattctcctgcctcagcctcccaagtacctgggattacaggcatgcaccaccacacctggctaatttttgtatttttagtagagacagggttttaccatattggccaggctggtcttgaactcctgacctcatgatctgcccgccttggcctcccggagtgctgggattacaggtgtgagccactgccccccagcctattttcactttatttaccaattttaggacctgatatggtcccacgttctgttctagacaccaagatacaacaacaaatgatcctttttattctaatggagggaaatgaacaaaaagcaaggcataaaaaatagcagcagccgggcacagtagctcacacctgtaatcccaagtaaggccaagttgggaggatagcttgagcccaggagttcgagaccagcctgggcaacatagcaagacccccatctctataaaaaaaaatttaaaattaactgggcttcatggcatgtgtctgtggtcccggctactcgggaggctgaggtgggaggattgcttgatcccagaagttgaggctgcagtgagccgtgatcatgctactgcacctcaacctgggcgacacaatgagaccctgtttccaaaataataataataataaaagcaaatatgcgctgctgtgagaattaacagagacttacttgggtgttcagaaagggcctctgaacaggtggcatttaagctgagattcatatgacaaggatggagcagttatgtggagatcagggagaagggagaatgcaaaggccttcagcaggcacaagcttgccatcttcccagaccctagcttttaactcctcttccccaggttcagggagattactatggagatctggctgctcgcctgggctatttccccagtagcattgtccgagaggaccagaccctgaaacctggcaaagtcgatgtgaagacagacgtgagtgtcatgggggctggcaagaaatgtggggggaggacccttaggttgtggggatgggcaaaaatgctcccacacttggctccctggcagcctaggtatgtgcgctgggagaaattctttccctgcctcaattttctcaccagtaaaatgggtccagttgggaggtgcaaagattagagggctctaggctaatttgcatagcacttgtgtggccagacctgggccctgcagctgcagcctttgctaaaaccactagatcctttgtggtgtgaccgctggttttctttccactgtttcccctttctctttttcagaaatgggatttctactgccagtgagctcagcctaccgctggccctgccgtttcccctccttggctttatgcaaatacaatcagcccagtgcaaacggctcgtctccgtggtctttggggtggggtagggtagggtggggactgtacaaatgaaatgtttctctaggttgctgaatctaaccaattaacccgctgcctgtggtaacgtcagtggttgctaggcagagtttcactgatgaaagccctgtgcagtaggagcgctcctaagcttaggtttcggacacaagcaaaggaaaacctaagcagcccaactaggggattgtagtgtcctctctagaccagtgggagggagccaatcggactacgcggaggatataaatcgcacagtaaaggttttcttggaagattatctggaaagggaggtgggaagtaacctgcgcctatctgcccagttttcctccttttcgcctttgagaacagtaatcgctcccgccagctcaagatcagctcctcttccagcctctttctgtcaatcctgcccgtgcccccttctttgcatttgtatcccctcccccaagtccgctccgatccaatccggagactcgactctgccccccgtactccagactaaatccgttcctcggctcagctaagcagctctgcacgtcccttcccacttgctcagccaatcgctgggctcggccccgcccctttgggcttggtccttctcacgccaccaatccgcgcctcttgtcccgccccctgcccgcgagtccgccaatcccgcccttcggaaagcgtcgcctggtatccagctgccggagcgggtcgcgccggaggggggcggaggcggaagtggcggtgccgggcccggggagtaggaaggagccggggctgtagccggagtggagcggctgccagccgaggagcaggcgcggccgcggcgccatattgcggccctcagcggccgcgaccgagtcatggctgagacctacggtgagggtggtggacgaagctggggtcctgggtctgggcccagggaggatgcggcctgtgggaatgggcggggctttgtagatcagggggcggggtctggtgtgatggaggcaggacctaagtggatgctgggaggggtttagtgggtctgaggctgagcttaatcgatttaggtggagcctgagggtctggtgcgtgggttaaatagatctggggcgggatttgagggagctggtcctgaggggttcagggaggccctgagggaagaggtgggccttaatggatctgggcggagcctgagtgaaggggcggggctgactgcatgaatggcaggagtcgggcttatgggctagagggaacactgaatggaagctcgggaccctggggctgatctggctggagagagctctggaatgggtttggggatgggctgtccttgagttaggggcaggacttagtggcaaagggtgggacttatgcatgagaatggagccgggttctgggcagagggagggaaggagaggtcgggaagtggaaaatcagtagggatgcaccataggaggtggtgattggaggcaggggaagtgcaggtttaggagtcagagggagccgcattcactcaacaaatatagaagagaagggagaagagtgcaaagaccctgaggtgagaaccagcttgtcattttcagggaatagactgaaggtcaggagctatagtggagtgaatgagtcagagggtggtaggaggtgaagaggaacaagggctatatcgtagtccttgtttaaatagctttcaagagactttagcgacaaaatagctaagatctgggactctggagcccttggcctaggtttgaatctcacttctgcccagctgtgtcactttgggcaagtcagttaacctttctggcctgttacctcatccggaaaatgggaataatttttagtctacctccctcatagagttttcctgaggatgatgtgagctgttgatgtgagtaaagacctttagaactgttcctggcccacaacaacacacaattgacccatgtaacaaacctgcacatgtgggctgggcgcggtggctcatgcctgtaatcccagcactttgggaggctgaggcaggcggatcacctgaggtcgggagtttgagaccagcctgaccaacatggagaaaccccgtctctactaaaaatacagaattagctgagtgtggtggcgcatgcctgtaatcccagctactcgggaggctgaggcaggagaattgcttgaacctgggaggtggaggttgcggtgagccgagatcgcgccattgcactccagcctgggcaacgaaaagtgaaactctgtctcaaaaaaacaaaaacaacgacaaaaaaacccctgcacatgtactccctgaatctaaaataaaagttgaaaaaaaatatatagaatgtgcctggcacatggcaagtactacataagagttatctgttactgttacctattggtttgtttctgcctatgtctgtttctctccctctaactgtgatggttagagagagagattggattggaatccatcttttttccctgtatctttctctccctgtgggtatccctgattttggctccatctggtcagacttcctcttcaaattcctggtgattggcagtgcaggaactggcaaatcatgtctccttcatcagttcattgagaataagtgtgagtttcccgcagtggtcctgggaaccctgagctgtgtttatgcgcatggtgtgggctggtgggcagccggtggggagggcagggctggccataggtacaagtccagtgctggctttttggtccttgctttgtcgtatgtcctttactaggttctccttgacctcaagtcactccagcaaggagaatgggtttgtagagactgagagggccttggaggatgggggatcctctgagctgtctcctctctccctgtactgccccttctgttcctcctactcccagtcaaacaggactccaaccacacaatcggcgtggagtttggatcccgggtggtcaacgtgggtgggaagactgtgaagctacagatttgggacacggctggccaggagcggtttcggtaggtgggctgggctcccaagggtgatggggagagagagtgagaaggaaagagagagatgtgtgtgtagagtcacttggagacactgagagggcagacaaggcagacagagagagatgagacaccgtagttagcaggtatatatatccaaggagagagggagtactggagagataaagagatggtggaagaaaaagaggtaggggccaggcgcaatggctcatgccggtaatccccgtgctttgggaggccatggtgggaagattgcctgagcccaggagtttgagaccagcctgggcaacatagtgagaccccatctcaaagaaagaaaaagagatagagaaaagtggcttgggggtggggaaagggatggagactgagagacaccgaaacagaaagagaaggggaaacttgagagactcacactcagaaaggaaaagagcaagagagacagagactaagagagttgaagagaatgataagggaggtaaggaggcctggcacggtggcttacacctataatcccagcactgtgggaggctgaggcaggtggatcacttgaagtcaggagttcaagaccagcctgccaatatggtgaaaccgtgtctctactaaaaaaaaaaaaaaaaaaaaaaaatcaaaaaatgtagccaggctgtggtggtggatgctagctacttgggaggctgaggcaggagaattgcttgaacctgggaggcagaagttgtagtgagtcaagatcgcaccactgcaccccagccggggtgacagagcgagactctgtctctgaataaataaataaataaataaatgaataaataaataaataaataaataaataaataagggaggtgaggagacacagagaaacagaggtcagaggcagagagggagacagggtgagtcagacaggtgtagttggacgttgaatgaatgaatgcacgaatttacgggaaggcaagggtgagcatgagagccacagagatggaacagaaagagagacagtgagaaatagggaactgaagacacacacgccaaggcaggagaaccgcttgagtccaggagtttgagaccagcctgggcaacattgtgaaatcccatctttccaaaagagagatggagaaatggacgtgttgtgggagagagagagagagaaatgcgtagggctcaacacactgtaggtcttcaggaaatgcctgcagagcagaaaagttgatagacacatagaaaccttaggagaggccgggcgtggtggctcatgcctgtaattccagcattttgggaggccgaggcgggcggatcacgaggtcaggagatcgagaccatcctggctaacatggtgaaaccccgtctctactaaaaatacaaaaaattagctgggtgtggtggcagacgctggaagtcccagctacttgggaggctgaggcaggagaatggcatgaacccagaaggcggagcttgcagtgagcccagatcgcgccactgcactccagcctgggcgacagagctaggctccgtttcaaaaaaaaaaaaaaaaaaaccttaggagagtcggagaaacagagagcagggagagaaatagagggaattcagtccacggaaaagtgtgatctatggcagcatctagtagctgctgagttaattcttgcgtatggattaactgcctgaggtgcacagagcccaaaggcagagagaggggctgaaggatagacaggtgtgtagcatgggctaggtttacggtgagtgcttagtaaatgctgtggaatgattgcatgagttccagaaggacccagactggtgagacagagaatgcagaattggctacactgggaaggagactccacctgacacagcaggagaaggataagcagatgttgtatagtgcttgggcagggccaggcaaaggggagatttgctcagaaaatgttgaatgaatgaatgcacaaatgcatgggaaggcaaaggtaagcatgagagagccacagagatgaaacaaacaaacaaaaaagacagaaatagggaattaaatagggccaggcacggtggctcacgcctgtaatcccagcactttgggaggcctaggcgggcagatcacttgaggtcaggagttcaataccacactggccaacatggcgaaaccccatctctactaaaaatacaaaaattagccgggcgtggtggtgcatgcctgtaatcccagctacttgggaggctgaggcaggagaatcacttgcatccggggggcaaaggttgcagtgagccaagatcacgccactgcacttcagcctgggcgacagagcaaaactccatctcaatcagtcaatcaatcaatcaatcaatcaataaaagacatgtagggccgggcacagtggctcacgcctgtaatcccaacactttgggaggccaaggtgggcggatcacttgagctcaggggttcgagatcagactggccaacatggccaaccccatctctactaaaaatacaaaaattagcctgatgtggtggcgtgcatctgtaatcctggctactcgagaggctgaggtgggagaatcacttgaacccgggaggtggaggttgcagtggttgcagtgagccgagatcatgccactgcaccccagcctgggagacaagagtgagattcctactcaaaaaaaaaaaaaaaaaaaaaaaaagaaaaaggaaaaagacacataggttaaggcaggagaatcacttgagcccaggagttggagaccagcctcggcaacctagcaaagccccatctttacaaaaaatattaagaaattagccaggtgtggtggtgcacacttgtagtcccagacactacataggctgaggtgggaggatctctccgttgggatactgagcctaggaggtcgaggatgcagtgagccaagatcgtaccactgcactccagcctgggctacagagcaagaccatcaaaaaaataaaaaataagacacacatgaaagagacacagagagaaaaacagacgaatggaaagatagggacacagggagagacaaaaatggagattcataaatagagacagctggccagctaagtgagatagaagctgagagaggcgaagagagagggacttcaaggatgcaagaagagagaggaattgcatggtgacccgaccaaggccaggttttgggggatgggccagcagtgaaggggggggcctccgaaccaccagtctgtctctgtagaggggggcattctcggggcagaccccagccttgggggtgactgggtccccctggccccacaggtcagtgacgcggagttattaccgaggggcggctggagccctgctggtgtacgacatcaccaggtgggtgcccggggtgggtggggtagggcatgggtggttcctctcctgcactgcctccctcccttctcccttctccacagccgggagacatacaactcactggctgcctggctgacggatgcccgcaccctggccagccccaacatcgtggtcatcctctgtggcaacaagaaggacctggaccctgagcgggaggtcactttcctggaggcctcccgctttgcccaggagaatggtgagggctgtgtcgtggaccaggtggtggtgggggtggacagtccacagggaccatgggtttactggctctcagtggctgtacccagcaggggaacgtggaggttcagaagtctgggttcaaatttgagtgttggctgggtgtagtggctcacacctgtaatcccagcagtttgggaggccaaggtgggaggactgcttgagcccaggagtttgagaccagcctggacaacacagtgagatcctatctctataaaaaatttaaaaaattagctgggtgtggtggctcatggctgtagtcccagctacagtggaggctgaggcaggaggatcacctgagcctgagagtttaagactgcagtgagctgtgatcacgccattgtactccagtctgggagacagagcaagacactgtctccaaaaacaacaacaacaacaaaacaacaacaaaactaagtgttgccatcagtgagctatgtgattacactggttctcagtttcttcatctggaaagtgggatcacagtgtttctgccccacagtgtgctgtgatgattaagggagattgtggaaagtccttagcacccgccacagagtgggtgctagattaatgttggccgctaaggtttcgcctaccgtcaggaggccgcacagggtattggttttttaaattaattattttatttattttttcctcctaccgcaccttcctgggtattggtttaatgtagagattgcaaccctagatggccctaggtgaaaggcacttttttttttttttttctgagacggagtcttgttctgttgcccaggctggagtatagtggcgcaatctcggctcactgcaacttctgcctcagcctcccgagtagctgggactacaggtgtgcgccacaacgcctggctaatttttatatttttagtagagacggggtttcaccatattggccaggctgatctcgaactcctgaccttgtgatccgactgcctcggcctcccaaagtactgggattacaggcgtgagacactgcgcccggtgaaaggcacatttttgaatacaggagatgggatggggtagatccttgagtaacaggtactggtgttaaggggagtgcagcatactgacaacccacaccaaaaggtttgcaagggccaaccacaatggctcacacctgtaatcccagcattttgggaggccaaggtaggagcatcacttgagatcaggagttttagaccagcctgtgtaacagagtgagaccctgcctctacaaaaaaaaaaaaaaaaaaaaagcctgggtgtggtggtatgtgcctgtggtctggggtactcaggaggttgaggcaggaggatcacttgtgcccagaagttcgaggctgcagtgatctgcaatcacaccactgcactccagcctgggggacagagagagactttgtctcaaagaaaaaaacaaaaaaggtttgcaagtataaactcatttgaaaacattgtgttggccaaaccacccacatctggtggcttgagatctgcctgtgttcccctgttttgcaacctccaggtttaaaggaggttttgccatcagagaggtgtgggtgtgaattcagctctgattttctgactgtggggccttgtcatgctgctgatgggtagactctggttggcctgttcctgtcctagatggtgctagagacacagtgttggagacagccctaggcccaaccttcatggagctcacagttcagtgggtgagggtggaaggacagacccacttccagacagtgacacctcaggaaggtcagggcttgatggtgaagcaccgggagacaggggtcagagccagcaggggagagccccagagggtcagggccagtactgggggggcaggcagagggatcggggtgggatggagaacacaggcagaggggtcagggctgggatagggcaggcagaggcagaggggtcagttgggatgaggggacacaggcagaggagttacatgggatggggggcaagggcagaggggttggggtgggatggggggcccaggtagaggggtcaaggccaagtttgggaggcacaggcagagcggttgcatgggatgggggagcatgggcagagggctcaggggtggaatggggcaggcctaggcagaagggtcaggggtggaatggggcaggtccaggcagaagggtcaggaaaggaatggggcaggcccaggcagaagggtcaggggtgggatggggacccaggcagagggttggggccaggatgaggaagcacaagcagtggggtcagggccaggatagggggccacaagaagctgtgggagccctaagtcggtacctgactcagcccaggaagtcagggaggacttcttggaggaggagctgtgtgagctgagctctgaaggaagagctgggtgggcatatcgggaagcggacattagtggcagggaaatggcatgcgcagaggcctgaggtgagggtaaggggggatggaacattggaggaacaggatgagagtcagcaggtgagagctcagtggagggtggggactaactggggccctgacctcagagtgtgtgcccctgcagagctgatgttcctggagaccagcgctctcacaggcgagaacgtggaggaggcgttcctcaagtgtgcccgcactatcctcaacaagattgactcaggtgaggccccgaccggcccgagtgggagcgaagggcaggcccgggggtctccaggcaaccaatgctgacctctccccttccccacaggcgagctagacccggagaggatgggctctggcattcagtacggggatgcgtccctccgccagcttcggcagcctcggagtgcccaggccgtggcccctcagccgtgtggctgctgagctctgtggagccaggtgggacactgggggctttagggaggcagggcggcctcttgggcatgggggagatggtgtggagatagacactgaacatgtgatgacaagagaaacagagtgagagaaagatgcaaaaacacacaagctaaaggaggcatctggctgggcgcagtggctcacgcctgtaatcttagcactttgggagtccgaggcgggcggaggcagttcattgggtgggggtggggagacagacccacttccagacagtgacagctcagaaaggtcagggccaggcctggctcggtggcttatgcctgtaatccctgtactttggaaggccgaggcgggcggatgacctgaggtcaggagttcgagaccagcctggccaacatggtgaagccccctctctactaaacatacaaaaattagctgggcgtggtggcaggtgcctgtaatcccagctactcgggaagttgaggcaggagaatcacttgaacctgggaggtggaggttgcagtgagctgagatcacaccattgcactccagcctgggtgacaagagcaagactttgtctcaaaaaaaaaaaagaaagaaaggtcaggaccagatggggaggcactgggggagaggggtcagagccagcaggggagaggcccaggggggtcagggccagggtcagggcacaggcagagggatcagggtgggatagggcaggcagaggcagaggggtcaggtgggatgaggggacacaggcagaggggttgcatttgatggggggtatacataaggtcaggagttctagaccagcctggccaacgtggtgaaacccctcctctactaaaaatacaaaaattagccaggcatggtggtacatgcctatagtcccagctacttgggagactgaggcaggagaatcacttgaacccaggaagctgagggtgcagtgagccaagattcagccactgcattccagcctgggcgacagagcaagactctgtctcaaaaaaaaaaaaaaaaaaaaaaaaaagagacatctgccaggccacagggaatccacctgcagccccaggccagcttcctgccctagaccttgaccctcccattcatagttctccagcgatttattgagcgcctgctgtgtgccaggccctgctcaaggcactggggatatggcagggagtacaacagactcccatcctcatggtgctgacattctctttgggggagacaggtgataaacaagagatgtaagtcgactgggcgcagtggctcacacctgtaatcccagcactttggcagggtgagatgggaagatcactttgagaccaggctgggcaacaaagcaaccttatctccacaaaaagttttttaaaattagcgaggcgtggtggtgtgcacctggagtcccagctacttgggaggctgaggtgggaggatggcttgagtccaggtgttcgaggctgcagtgagctgtgaccatgcgccactgcattccagcctgggtgacagagcgagactcttaaaaaaaaaaaaaaaaaaaaaagtaaagtatgtagtagtgagggaggtaagaactatggggaaaaataaaacaggcacagatgagtggatagggtggaggagtgtacttttttttttttctttgagatggggtattgctctgttacccaggatggagtgctgtggcgtgatctcggctcactgaaacctccgcctcctgggttcaagtgattctcctgcctcagcctcccgagtagctgagattacaggcgactaccaccatgcctggctaattttttttaatttttatagagacagggtttctttttttttttttttttttttttgagatggagtcttgctctgttgcccaggctagagtgcagtggcacgatcttggttcactgcaacttctgcctcctgagttcaagttgcctcagcctcctgagtagctggaactacaggcgcccgccaccacgcctggctaatttttatgtatttagtagagatggggttttaccatattggccaggctggtctcgatctcttgaccttgtgatctgcccgcctcggcctctcaaagtgccgggattacagtgtgagccaccgcacctggccgacacagggtttcatcatgttggccaggctggtatcaaactcctgacctcaagtgatccacccactcttggcctactaaaatgttgagattacaggcgtgagccactgcgcccggccaagaatgtacttttttttttttctgagatggagtttcactcttgttgcccaggctggagtgcaatggcgcgatctcagctcaccgcaacctctgcctcctaggttcaagcaattctcctgcctcagtctcctgagtagctgggattacaggcatgtgccaccacacccagctaattttgtatttttagtagagacggggtttctccgtgttggtcaggctggtctggaactcccgacctcaggtgatctgcccgcctcagcctcccaaagtgctgggattacaggcgggagccaccacgcccagcctttttttttttttttttttttgagacagagtctcactctgtcgccatgctagagtgcagtggcacgatctcggctcactgcaacctctgcctcctgggttcaagcaattctcctgcctcagtctcccgagtagctgggactataggtgcgtgccaccatgcccagctaatttttgtatttttagtagagacatttcaccatgttggccaggttggtctcgatctcttgacctcgtgatccgcccacctcagcctcccaaagtgctgggattacaggcgtcagccaccgcacctggccaagagtgtacatttaaacaagatgaggagggaagcctcgctgagaagatgacatttgagtgaaggaagggagatagggaggcctgtggggatctggggcaagagcactgctggagagcacagcaacgcttctagcgaggggtatgcctggtgtcggtgagggtgaccaaagcagccagtgtggtcatcatggaggacctgtgtgtgttttgtgggtacagcatgagatggggtcaggggttggaggaagcagatcagttagggcctgtgggccctggggaggcctctggcttataccctgtgtgggagccatgggaggcttctgaacagaggaaggacaggatcagattcaggggtgcagagagttcctctggctgcataaagggaaggggctgtgagggacagaggaggtcaccaggacaccagagaggaagctgctgcaaagtccagggaagatggtggaggacaggacaagggggcgggaagaggagtggctgagaagggaatagggttcatgtcctccctagactctctgtcttccagtcttggcctctctcttttttttttttttggttcctgtctttttattttgagacagagtctcgctctgtcacccaggctggagtgcagtggcgcgatcttggcttactgcaagctccgcctcctgggttcatgccattctcctgcctcagcctcctgagtagctgggactacaggcacccgtcaccatgcccggctaattttttgtattttttttagtagagatggggtttcacggtgttagccaggatggtctcgatctcctgacctcgtgatcctcctgcctcggcctcccaaagtgctgggattacaggcatgagcctttcctttttttttttttttttttttaattttagagagaatctcactctgctcactctgtcacccaggctagagtgcagtggcgccatcttggctcactgcgacctccgcctcccgggttcaagtgagtctcctgcctcagcctcccaagtagctgggattacaggcatgtactgccacaaccagctaatttttgtattttttttttttttttggagatggagtctcgctttgttgcccaggctggagtgcagtggtgcagtctcggctcactgcaacctccgcctcctgggttcaggtgattcttctgcctcagcctcccgagtagctgggactacaggtgcgtgccaccacgtctggctaattttctgtatttttagtagagatggggtttcaccatgttagccaggatggtctcgatctcctgacctcgtgatccacctgcctcggcctcccaaagtgctgggatgacaggcgtgagacattgcgcccggccaatttttgtatttttaatacagacagggttttgccatgctcgtgaggctggtcttgaactcctgacttcaggtgattcacccgccttggcctcccaaagtgctgggattacaggcctgagccactgtgccctgccaatcctgtctccttttgatgcagccactgggtctttctaacacacatatctgctcctgtcgctccctttttcaaaaccatccatgcatctcagggccccaggacacaaatgaactcctcagcctggtgtttgaccctctgcagggactggcccctgccagcccagccttaccggcctcagccacttgtcggtctccctacctctcaggccactccagccacactgaagttcttcccattcctctgggcccttgctcatgctgggcctctgcttggaacattcctaccctcttttccctggcaacctccttcctccaggcagcactacttgttcctccaggcttggtccaaacttttgtttttttttgagatagagtctctgtcactcaggctggagtgcagtggcgtgatttcggctcaccgcaacctccgcttccaggttcaagcaattctggtgccccagcctcctgagtagctgggactatgggcatgggccaccaacgcctggcaaagtttttatatttttagtagagacagggtttcaccacgttggccagctgctcacaaactcctggcctcaagtgatccacccacctcagcatccaaagtgctggaattataggcatgagccactgcacccggccccaaacttcttgacaggctttcaaaaccctgcaggatttggtcccatccctccttctctgggggatgtgtatgtcttgccagttctcccttctatacttcatgctaaatcccctcccagcccttggcagctccagggtgggacaggtggggaacaagtggttagaccttggatctacttggaaggcagagccaacgtgatttcctgatggaatggatgtgtaatctgaaagagagagaggaatcaaggatgatgtcttcagacagtgctctcttgtctttccaggactttgcacctgctgtgcctgagcctaagtttgctcatctgtaaaatgaggctaataatagcacctgcttctatagatgttgagaagaagaaatacattaattcacgaaagtgctcagaatggggcctgatggtcaagacttgatcgatgagggctgtttttaaagttttcttcttatccatctttgggctgagctcaaatgaatgggtgtgtcttcttcacctcagggcttagcagagactctgtcctagagagtttgccctcagtaggtgaaatgtaacaaggcaaggcaaggctttttcacactttgctgactgcaatctacaggaggaaatatattttatgtgttaatcaaggactgactgtagcagatcccacccacatataaaactcaaacacacattttcctaccaccagtattctttcgtttcttggcactaaaatgaaagtcacataacatacatttacgtgacttttcaaagtgtacaattcagtggcattcagtacattcacagggttgtgcaatcaccacttctgtgttgttccagaatgttttctttttttttcttttcttttttttggagacagagtctcgctctgttacccaggctggagtgcagtggtgcgatcttggctcattgcaagctccacttccagggttcaagcaattctcctgcctcaacctctggagtagctggaattacaggcatgcaccaccacacccggctaattttcgtatttttagtggaaacggcatttgaccgtggccaggctggcttgaactcctgacctcaggtgatccacccgcctcggtctcccaaagtgctgggattacaggtgtgagccactgcgcccggcctcagaacgttttcattactctcagaggtgccatgcttatactgctttgtaccttatacctttgtacccatatttattaagcagtcactctccatttcccccaacccctagcaaccaccaatttgttttctgtctcttttggccaatatgatattcttttccttttccttttttttttgagaagggtctcactttgtcacccaggctggagtgcagtggcaccatctcagctcactgcagccttgacctcctgggctcaagtgtttctcccacctcagccccccaagtaactgggactactggtgtgcaccaccacgcccagctaatttttatatttgtattttttgaagagatggggtttcaccatgttgctcaggctggtctcgaactcctgagctcaagtgatccacccacctcagcctcccaaagtgctggaattacaggtgggagccaccatgcctggcctcttttccttttttcttttcttttcttttttgtttttttttttttttttttttttagatatggtctcactgtgttagcggggttggtcttaagctcctggccttgccgggcgcagtggctcacgcctgtaatcccaccactttgggaggctgaggcgggcagatcacgaggtcaggagttcgagaccagggtgaccaacatggtaaaaccccacctctactaaaaatacaaaagttagccaggcgtggtggtgtgctcctgtaatcccagctactcagggggctgaggcagaggaatagcttgatccctggaatcagaggttttagtgagccgagatcgcaccactgcactccagcctgggcgacagagctagactccgtctcacaaaaacaaaaacaaacaaaccaaaaaaaccaaaacaaaacaaaaaaactcctggcctcaagcaatcctccacctcagcctcccaaagtgctaagattacaggcatgagccaccgagcccagccaaccaatataatatatctttttaaattattattattattttttgagatggagtttcgcttatgttgcccaagctggagtgcaatggtgtggtctcggctcactgaaatctccgcctctcaagttcaagcgattctcttgcctcagcctccctagtagctgggattacaggcgcccgccaccacgcccagctaatttctttgtatttttagtagagacagggtttcaacatgttggccaggctggtctcaaactcctgacctcaggtgatccgtctgtcagcctcccaaagtgttgggattataggcatgagccactgcgcccggcctatttacaaaatttttttttttaaataatgttttaattttgtagagatggtgtctatgttgcccaggctggtcttgaactcctgggcccaagtgatcctctcttgcccttgcctcccaaagtgctaggattataggtgtgagccactgtgcctgcccaaccaatagaatattcttattatatatgatgcactctggtatttgccgttctgtgctattctgtttgaatttaaaaattggtcaagacccaccaaactgatttccccaccaaggcagtgacacacattagaatgacctggagaattttaaaagatactgatgcccaggcctcaccctagagattctgaagtggtttcaggactttttcttaattaaaagataaatagagatgaggtctcactatgttgcccaggctggtctcaaactcctggcctcaaacgatttctcccaccttggcctcccaaagtgctgggattaaagacgtgtgccaggctgggcatggtggctcacgcctgtgatcccagcactttggggggctgaggcaggcggatcacaaggtcaggagatgaagaccatcctggcttgatctgtagatcaagtgaaaccccgtctctactaaaaatacaaaaaaaaaaaaaaaaaaaaaattagccaggcgtggtggcaagtgcctgtagttccagctactcaggaggctgaggcaggagaatggcgtgaacgcaggaggcggagcttgcagtgagcctagatcgcgccactgcacttcagcccaggcaatagagcgaggctccatctccaaaaaaaaaaaaaaaaaaaaaagatgtgagccagccagttgcaggatttctggaagctcccaggtaatgctatatacaaccaaagtgagaaccactaacctaacgttgtctccccagcttggggaacagtgaaatgagacttagagccagggtgatccaggaacatagagggacacagaaagatacaaaggcaggttcattttatttatttatttatttatttatttatttatttatttaaattttttgagatggagtgtccctctgttgcccgggctggagtgcagtggtgtgatcttggctcactgcaacctccgcctcctgggttcaagtgattctcctgcctcagcctcccaagtagctgggactacaggcacctaccaccacgcctggctaatttttgtatttttagtagagacggggtttcaccattggccagggcggtctgaactcctgaccttgtgatctgcctgtctcggcctcccaaagtgctgggattacaggcgtgagccaccgtgcctggccgatttatttatttatttatttatttattttgagatggagtttcgctcttgttgcccaggttggagtgcaatagtgcaatgtcagctcaccgtaacttctgcctcctgggtttacaagattctcctgcctcagcctactgagtagctgggattacaggcatgtgccaccacacctggctaattttgtatttttagtggagatgaggtttctccatgttggtcaggctggtctggaactcccgacttcaggtgatctgcccgcctcggcctcccaaagtgctgggattacaggcatgagccaccgcgcccggcctatttatttttttgagacagtctcactctgttgcctaggctggagtgcagtggcacaatcttggctcactgcaatctccacctctcaggctcaagcgatgttcccacctcagccccccaggtagctgggactactggtgcatgccactacacctggctaatgtttgtatgtttttgtagagacggggtttcgtggtgttgcctaagctggtctcaaactcctgggctcaagcattcctcctgccttggcttcccacagtgctgggattacaggcgtgagccactgcgtccatccagattcatgatatttagatgttgaaatgtggctttacagactcagacagctctctgaggcaaacaaagagggagatgcaggtaccctcagcacaagccccaaattacctgcaggggagaggcggaaaatcagacaatgtagaaaccgggagaagaaaggtatggacagaccgatgcagataggaggggaaggaaatacctggaaatgagatagagaccggctggacagaccccggggaccctgcaggtcaccacacccttctctttcagctcacctgttctccaggaccagccctgctggggcccaggcccaggctctgagaggccgtgtcctaacctgccctggccccggagaagctacgttgccacctgtcccccttccctggcctggtggggcctggctttggggcaagactgagccacgggggaagggggaatcccgtacctgctgctgcttcctctgtcttggctaacgtctgtccccctgaacccctaaccataccccaagagctcccaaagcctgagaccagggtcatttgtccccaactccccatctggccctgctgttgctagtacctgttatttattacctggaggcctgtccagcacccaccctacccccataaagcattgtttacacctgtgtcttggcctccattattgtgagatggcagggagatggaagaggtccctgatggaagaatcatgtgtcatggtgtttgggggccttgtttctgtttttttgttgttgttgttgagatggagtttccttcttgttgcccaggctggagtgcagtggcgtgatcttggctcaccacaacctccacctcccgggttcaagctattctcctgcctcagcctcccgagtagctgggattacaggcatgtgccaccacacttggctaattttgtatttttagtagagatggagtttctccatgttggtcaaggttggtctcgaactcccaacctcaggtgattcgcccgcgctggcctcccaaagtgctggaattacaggtgtgagccactgggcctggccttgggggccttgtttcctgattggacgtggtgtggggtataccaagcatgatgactcaggtgcctgttgcggagggagggaatttgttactgtgtggacagtttgtgacaatctgtgttctaagctcacgtgtgtaaacacgctgatgtccctgtgtttgtgacatgtgtacatgtttccagtacctgcatatgggatgatgtctataggatataatgtgtgctggttgtgtgtgatgctgacagccgtaactgctctgtggccttggtcattgtattggtgaggctggtattgtttgggacatcaaggccaggggatgggaatttggacctataggtgggcctccggtgtgtgcatgtctgatgcctgagagtcagaggcagtgactcactactgcgtgtgtgcctgtgcatgtgtaccccgaggtctgtgtgtgttttggtgtgaatttggctccttttaaacacccatgtgtggccaggcgtggtggctcatgcctgtaatcccagcacttcgggaggccaaggcagatggatcacttgagcccaggagttggagactatagcctgggcaacacagagagaccctatctacaaaaataaaaaacagaaaaagttagccaggtgtcgtggtacacacctgaagtcccagctattccggaggctgaggtgtgaggatcactttagttgggaggttgggcctgcagtgaactatgatcatgccacagcacttcagcctgggcaaaagggtaagaccccatctcaaaaacaaaactaaactagaaacacccttgtgtggccatgaaccctgtgtgtgccctgaggactgcgggcttttgtgcaatcctcacgcatgtgtggataccagtatgcatgcccttgtgctcacgcgaaccgccctacgccctcaggtggcctgcaggggactggtgcagccccgaggacactcccagttgctcgtcgccctcccatctccacgtcggccttcaccgacccggcgggagccttgagtcccagctctccagagcaatggtggagcgggcagggcattcaaaatgaccttatctccttagtctcctaaagtgttcccagctggccatgcaaatgtcttctctgtgtagcgttccgtggatttttttttgtttcattttttaattttgtgtaaagataaggtctcactccgttgcccagactttccctggttctttattctgattcccacaatcgtcccgagggggcaggccggagcgggtcttgaaaatacacatttgcacatcccttctagtccgcgttcccttttctcaagggcaacccgcacttttttgcctccgttataaaagatacttatgtaaattactgacgtgcgaatttacatacatttctcaactaactgcgtagccatttctccgtctctcacctccgttcctggacggcgagaaggaggaggagctgaccatgtaaatgaagtcacgcgcaccgcgctgccgaactcggtgccccgcgctgggcggggggcgggtaggcctgtccatgtaaatcacatcatttgcgtgccccgccccgccgacgccacttgattccaacatgcaagaaacgccccctcccagacccggcccctcacactgcgttccccctcccgcgcaaagggggcggggcggaggatgcaaatgaacctcgtgtaggccacggaccgctgtttcctttctccttggtaggggggttgtcccgaacttcctcgccccgctccgccccgccccgcgcggctcgggcctgcgcaggcgccgtcccctccgcggggcgcggtcacgtgcccaccgggcgaggcggggcggggcgtcgcgcgcggtgggggcggggtatggcgcgctgtgcggcgcagggcggctggcacaaacggcggcgccggggccggaggaaaaagctcggtgaggaggtcgcggggcgagaagggagcgggaggagactaagccggagccggggcgccggcgcgaaccgggcggggtgtgggggcgcgcgccggggcctgccggggcgaccccgggaagggggatgtgggtgcggcgcgggggaggggacgcgcgccggttacgttgggtgccggccgttgtgggggttggggtgggggcggggagcgcgcgccgggcggaggccgagtggagggggaggggagggggtccgagcggcccttaggccctgcccctgtcgcctactgcgctcagaaggggcctcagggcctgccccgggttgggggcgttggggtgccctggatgggggcacctttatctctcgtcctgtctccgggtgcgtgcaccctcctccgtcctttcctctgtcgccgcggaccctctccccgagggcccctcccgtcggtcagtctcgggacctcccttccgtctgggcgtgtgtccgcccccggccggcttcctcccgtcgggctcgggtcgaccccaccgtcccgctccgccccgggtcctccctcccagcttccctccggtctatttttctgtctctgggcccctcgttctctttgtttttggactccccagtttcctctgtcttttgacccccccgcccccaccctgactctccctggaacccccacgtttctcgttgtctttctggaacgccgaggcaggtccctcctattttccaaaccccctcctttcccactcctccacaccacccttttctactccagccctccttcttctgtctttggttaccgcgtcccacaacctgcaccacagtcctctgtcttagggtcatctacccagcccctggcctccagcctctccctatcactgcctcttatctgtcagcggactcccgcacctccagattctcagggtcctctccccgacttggcctcaggttttggggggcctctatagtcaagtctgtcctggtcgtcttccccactcctgcccataccatcccggctttcccctgcctgcctgtctctagtttctctcacatccctttttttttttcctttctctagccaccctgaagggtcccttcccaagcccttagggaccgcagaggacttggggaccagcaagcaacccccagggcacgagaagagctcttgctgtctgccctgcctcaccctgccccacgccaggcccggtggcccccagctgcatcaagtggaggcggaggaggaggcggaggagggtggcaccatgggcccgggcggtgccctccatgcccgggggatgaagacactgctgccatggacagcccgtgccagccgcagcccctaagtcaggctctccctcagttaccagggtcttcgtcagagcccttggagcctgagcctggccgggccaggatgggagtggagagttacctgccctgtcccctgctcccctcctaccactgtccaggagtgcctagtgaggcctcggcagggagtgggacccccagagccacagccacctctaccactgccagccctcttcgggacggttttggcgggcaggatggtggtgagctgcggccgctgcagagtgaaggcgctgcagcgctggtcaccaaggggtgccagcgattggcagcccagggcgcacggcctgaggcccccaaacggaaatgggccgaggatggtggggatgccccttcacccagcaaacggccctgggccaggcaagagaaccaggaggcagagcgggagggtggcatgagctgcagctgcagcagtggcagtggtgaggccagtgctgggctgatggaggaggcgctgccctctgcgcccgagcgcctggccctggactatatcgtgccctgcatgcggtactacggcatctgcgtcaaggacagcttcctgggggcagcactgggcggtcgcgtgctggccgaggtggaggccctcaaacggggtgggcgcctgcgagacgggcagctagtgagccagagggcgatcccgccgcgcagcatccgtggggaccagattgcctgggtggaaggccatgaaccaggctgtcgaagcattggtgccctcatggcccatgtggacgccgtcatccgccactgcgcagggcggctgggcagctatgtcatcaacgggcgcaccaaggtaaggctaggtgggggcctctttggaggggctttgcagcaccctggtttgcagcattcagtgctctgagcacagtgggtttggagacaggcttctgggaggtcacagaaggtttaggcagttcagtggagtgggtatgcttacttgtggggacttgggggggtctttatcctccctacgggccttaatgtgtgcacctgataagctaggagtttgtcctggagccacagtggttcttttttttttttttttttttttcttttctttttttattgatcattcttgggtgtttctcgcagagggggatttggcagggtcacaggacaatagtggagggaaggtcagcagataaacaagtgaacagaggtctctggttttcctaggcagaggaccctgcggccttctgcgtgtttgtgtccctgggtacttgagattagggagtggtgatgactcttaacgagcatgctgccttcaagcatcgccacagtggttcttgactttgccaggaaccctcttaaactcatgagagctgctgacattcacagcgtggaccttggtggggttcatggcctcctggtgtcagtctgtggccccagaccaagcacggggatgtagataggcacacagttcacctggccgttctctgttgctgtctgtccctgtccacatccttccctgtgctcctgtcgtccatccctgtttgctggcccatgtttctagtccatccatcctgtctccaaggcaggagaagcagaagggggagggtggctgtgatgagtgagccctgggctgagggaaggaaaggggtgctgcccgctgggccgagtgcttggccctggactgcattgtgccctgggtccccactgtggcatctgcatcgaggacagtctcctgggggtggtactgggtggctgcctgttggcccaggtggagctcatccccatgtctcccacccttcactgtcccagtccctgccctccattccccctgtcctgtgtgtcacttcctccctacccatgtctgtctcttcctctgcctttatgtgtttgttcttagtccctttttctttttgctttagaacaatagttcttaatggtattttggagcctgggtctttttgagaatctgtcagaggccacagatcctctcttaagacaaatgctcatttgcttggagtttccgggcagttgtcaaggcctcatggcctccagctgcctgttcaggaacctggggtcaggagcccagcacaggacagtggtccatagggcctttccgggctgctgacaggatcattgtcttcatgggtggtgtgggggcctggccttgagtccaaggcttggtgtcctttggacaaggccctgtggggagtgcccactgctcaacacagtgatgcctggctggctgatggcacgggcagtgttgtgccctgcaggcgtgaggctgagctcctgatgtcctctgcctcctcctgcagatcccatcttgggttctgcttctgtgtggctttcctctcaggctggagctggctcagggaccagggctcccccggggccaaggcctgtttcctccccaccccagctggaacttgttctacttccctctccctcccgttacttgatagctgagccagagccggcccctccctgggcttggctcctgtgcgggcgggatcagtggcctccctggctcagcatcttcaccccaggttggctgtcgtcctcgtcagggggagaccagaagggctgagtggcccagatgggacactgctctgagcctcaatttgctgatccacggaatacgaaaaccaggttacatccccagtgagtctggcagtttggggaggggagagtaggagaagatctcttgtgttttggtgcctctggtgcccactttctatgtggttggggacagggccccagcgaggattggggaaggggcgtgtttggacttttttagccctaggtgaccttgattgtcctagggaagtaaggacaggccaggctggactgagaacataggggaggagccctcccctccccagtgagacagcaactccaggctttcccgcttttagatgggccccatctggactctctcctgtactccagagtaaggctgtggggtgctcaggtgggctgcagcagttgccgtggggacatggatcaccagtgtggctagagccagtagaaacgtgcttcttagtcgttctgagtggagctcctgtgtcatccttccttcccccaactccctggttggggacaggtgctccgttgacctgtaggtgggagagagttgactcccactggcagcaagggctaccagaggggaccccagggagagtccagcttgcttggtttgctccttgaagagcagcttggaggtgggacagtcacaggcttctgactggggtgtgtgtgtagtgggggtggggctcttggcaggcagattgtcaccaatagcctttaagtctttggtctcctggccctggtcccacctgtccctcccctaggtgggaggggtggagagcaagtttcctgaggccttcccctgtgagggcaggaagtagatactttccttggggccagaggatgctttcacccccaaggtgtgtatatgtgggggaagggtggggccctaaagagcaggttcctgtttctgtgtgagtcccatgtgcttggtgggaggcgctgtgtgagaatgtacagggcaggaggaaacatagcagggctggggtgcagaggaggcccagagcagtgcactccagtctgcaggtactgcactgggcactggggagaccaacctggccccaggggcttccctgtggctgccttccagggcagtactaggtaaacaggtgcctgtgctgatgccatgttgctaggagtggaacggacaatcagccggagtactcaaggtgacccttggtctctgaatcctgaataacaaagagggtcagaaggaagagtgtcccaggccagtgctgaggccttgtggtggcgatgagctcagcctgttgaggcatggagcagagtgatgggagaggcacatgaggttgggggcctttgaggctgtggttgggaatttgtattttctcaggatggagtgaagacctggagaggaggggctctggctgctgtgtggggatgaattgtgggaagagggtgcagcactggaccccttccctgccacccatccacgtgcatcatcagtgtaatctctgattggattcctaattggggaggtcttgcccatctctagtcagtaactcactgtttctaagcctcctggaccatggcccaattcttctcccagtgaggtggttgctcagagtgccgacccttccatagggagtgagcagtgcaaagaaggtgccccctcctgaaccttgaagtgtagccattagggttttccctggggggccttctcactaattgtactctggtgctgccagagagaaggttgtcagcttcccactgctaggtggcagtagatggtggcagccctctctttccagggcaaggtctggtggatgaggtgcacatggttaatgcagagcagcttaacatccaccacagagggtgagccctgggataatgtgttgggaggcgtcctggggagggtgaggattgaagcagcccagtctgctgtggcgtgcgtgcttggcaagcatcctgttgtggcagtggccactgatgtttgatcgtgaatgtttatcttgggactgtcttgctgggccgggcccataggtgtagctgagcattcgtggggaatggacgccagcagagttgtaccagggcagagaggtcagggcagagaggtcaagacagatggtccgggctggggagaagttgaagggtccttgtgccagtcctcccctttttgtgtgctacctcatcttgccactgcagtgactttgggcagagggtgggacagggaccttttaaaatttttaaatggcatttcagcctgtgctccagttctccatgtggcaggcactgtgctggctgtcttcccagacacttgttatcttgttcacttgttccacaacaacctgtgaaatagctgtgagctccattggatccatggatgaggaacctgagaccaggaagtcacctgcctgatgccacagctcatgtggcagcactgagacttgaaccagggaattgtgtctgcagaagtggctgggccatttcctttacctctcagccacctttctgccagctccctgatgacaaacatcccggggccctggccacagcattgtagggctgggtcaggggagtggcaactgtcaggcagaggaaagaaccctgtagacagagaaaccaagccctgcaatgagtcctgttagatctccaggagttggggctccagaacctcccaagttatgttctcagagagattaattgctaccgctgtaaacagcagtgtttattacccctgctgtacacatcaggcagttgaggcccattcaggtgttggaactggctagggttacccagcaaattatccttggagttggaattaggtctttctattcagactgtagcttttggctcctgttcggaggtctatgggacagataatttagtggggattctttgtagtccagggcagcagttcttaacattgctgcatggtagaattacctgggaagctttaccaatttcaggcccttccttaggccaggtacttcagaacctcagagctccccagggggctccactccacagccaagggtaagaattcctggtctagggctgtgaggccacctccttgcacacctgaaaatgtttaaattggtattattctactgaaatggctgaggtggggtttggggtatcttgaaacaaatcaaactctgttactaattgagccctagctgggtgccaggccccaggtatgtgtgttgggagggagtgggctcttgaggcccaggagctgaggtttctgatagacttggggatgggattttggctgaaaaagaaagtcttttggggcaggagcttggaacccttgacccaaggagtcatggggaagatggggcaaggaggggtgggaaaataggtaattcatggctgcttctctaagatgtgcctgcctagccccagtaaacctacctccctccatccctgccaggccatggtggcgtgttacccaggcaacgggctcgggtacgtaaggcacgttgacaatccccacggcgatgggcgctgcatcacctgtatctattacctgaatcagaactgggacgttaaggtaggggtgagggtgagggtgagggtggcgctggggctagggctggggcgggggtggcgtgcgtccactccattttccactctcagcccagattctggcattctcctgtttctcttctcaacacacagcgggcagtgcgatctgccggctcttcctgggaaatggcacctcctcctctctagcggactgtgtggtgggaactcccctctttccgggaatggtgctgtctgcccagccccacccggccttgtaatgaacactttcccccttttcctgtctttagtagcttcctgcccatctccatggtgatgcagtctctgggttgtcattcactttgagagcccgaggggtgggagggagtgatgcaggcagacgctgcgcctcctagtgggctcccggggcaccgtgggaggcagcggctcctggccgtaccagctagcctcatcctttggcctgcccccaggtgcatggcggcctgctgcagatcttccctgagggccggcccgtggtagccaacatcgagccactctttgaccggttgctcattttctggtctgaccggcggaacccccacgaggtgaagccagcctatgccaccaggtatgacctgtacttctggagacgcacccaggtgctccccctgtgacaatgtcctgtcagagcctcagagtgactagggagcgacgaagtattgagagggggcctaggtgggagcagaaccgggtggctcaaaaggatggccgcctagtgtgtgtggatatggtagctggaattgcagaaaactaatgtccaaccaccctggtctccaggtacgccatcactgtctggtattttgatgccaaggagcgggcagcagccaaagacaagtatcagctaggtacctgcttccctcccttcagtccttcctattctgtgggccctcttgggcctgatgccaccccatccccctcatcagcctcttgttaaatcccaccactcatttttcttcatctctgcccaccttccttagcccactctcctggtaccccaacaggagccccatttcttcctggtcctctccccatctccccaggtttcccttggcttctttgtccttctgatgactcactgtctcctgtcccctctcacccccagcatcaggacagaaaggtgtccaagtacctgtatcacagccgcctacgcccacctagtggccagtcccagagccgcatggcagacagcttaaatgacttcaggagagccctgggcctgtgctggctgctccttccctgccaccgctgctgcttctgactttgcctctgtcctgcctggtgtggagggctctgtctgttgctgaggaccaaggaggagaagagacctttgctgccccatcatgggggctggggttgtcacctggacagggggcagccgtggaggccaccgttaccaactgaagctgggggcctgggtcctaccctgtctggtcatgaccccattaggtatggagagctgggaggaggcattgtcacttcccaccaggatgcaggacttggggttgaggtgagtcatggcctcttgctggcaatggggtgggaggagtacccccaagtcctctcactcctccagcctggaatgtgaagtgactccccaacccctttggccatggcaggcaccttttggactgggctgccactgcttgggcagagtaaaaggtgccaggaggagcatgggtgtggaagtcctgtcagccaagaaataaaagtttacctcagagctgcacacatctgactccatctgcaatttagggcctttattgaccgaggagggtatggaggtttgagggccagtgagcccaccatagtggagcctgacctcagcaggccactggctggagctggaagtctggggggacactgcccaggccagtgcactgcaggtgaggttgatggtgccagggcgtaccacagggagcaggcagaacctctgtaaggtggccgtaaggaataggaagatacccgagtgggccaggcctgtgcccaggcacatctgctttgccgggtacacaggtgcacagtgagcaccaggtaccccagagccagtccaggctggtccccttcctcctctgcctgcacctgaggcaaagggcatgaaagcatcattgccctggaacttgcccttgtccaggaagttggtagggttgaagcagtctgggtctttgaattgagtggggtcccggtgtgcagtcacaagcaggggaatcacaaaagtgccctggggatacatgcaacttgggttacctgcgggcttggtgagcacctgcaccacctccatccaagacgctttttaaaagcccaagggaataggccgggcaagtagctcacgcctgtaatcccagcactctgggaggctgaggacagatcacttgaggtcagaagttcgagaccagcctggccaacatggcgaaacctgtctctactaaaaatacaaaaattagccaggcgtggtggtgggtgcctgtaataccaggtactcaggaggctgaggcaggacaatcgcttgaacccaggaagtggaggttgcagtgagccaagatcatgccactgcattctagcctgaatgacagagccagactccgtctcaaacaacaacaacaaaaagcctaagggaaggcagagctgccttcctgctccaggggtaactgattgtgttttggtctgcacagcgcacacctgctgattctggctgatctcatgcacccgggtcccgcacgggatccccagactcagtgggtacctttgggcagacagtggctgtgcaggtgggtgtcgagggtgagggtgcgcggcagccccaggggcaccacgctgatgaagcactggatctcgagcagcactgcgttggcgtagggcaggcacacgcgatagtccaggcttggggcgggcctccaccctaccacagggtccagctcctgcaccttggctcaggccgggggaggctgtgagctgcgcacttccaggaccctccagccatccccagactgcagcctcccattctgggtctctccgggttgcacacctgccacctctaggtacttaagcagaatgaggagcccatagcacagggtggtgctcgtggtttcggtgacgccaaaaaaaaaatgcgtcgtcattaccgacgtctactcctggaaatggctctccgggtcctgctgttactgtgggcagaggagatgtgctgccgcgtgccaggcacctgttggtgggcggcatggatagagtttagagagctgggacccatgccttacccatctggtcaagcaatcaatgaaatcgcggggctccgctggctgccgcatctgccagtgtcgttgaatttgctcagagatgacccgcagctccgaaaagtttcggaagattcggtggtgcgggcccgggagccagtccatgagggacaggcaaatgtacatctggagagacagggtctgtctcaacatgggccctgcacaaggccactaggccttagtttccctacagggagattggactaggactttgatactggatgttctagaactcttccaggaatctgtcccattctaatgatccattgtaggtaggtctgtgtactcgggatttggcataaggctggacgcaccaaggaaagattgtggccggccctctcacctcgccccatctggaactaatgatgcagaagttgtcactgaagaggttcaggagcctcaggaactccgggtccccatagcgatagcggttcccgaagacaagaacagataacattggatacagcattatccagtagccgcacggggtcaaacggggctcctgggggtaggaacaggacggtggtcataacgcgtggtcctgcccccagccagccccatgggcttactggctttcttccacccaaataccttccagtggccccgtcttggcagtgcaagggactctcccacaccaggcccttccgctctcccggccaggccgaagcaatggtggcttgaaattcgtctagcagacaagccgcctcctccaggacgcgcgcctcgacggtccgcgtacccaacccgaacttcttaagcgctccaagtgcaaaattgcgcagtgtccaccagcacggccggttagaaaacaagattcctgtggtggggacgggaaaggaggcgggccggggagccggccacgccctatccaggaagcgccgggtcactggctacatccctttaggggcctccgactcctgcggccggcttcgttccctttgcttctttaccagacctccaagtgccctatccacacattggccccgcctttgctgggctccatccctgacctaggctggctctcgggctttgactcttaggctcttttctcctgttggctgcaggatgaacctccattctaaccttacgctttagcgccgccccgccctctctcggccgtttgcacctcattagctggagtctctattaggccccgcccccatttgcccgcctctaccatttacccgcccagcctggagcgtccgggccggcaagtccagcgccggggcctcactgtttccgcgtgtgaagcgttcgaagactgccatggacccgcggccagagaccgcatccgcctgtagcactaacgcgtcccgcagcgctgcgtagccgcacagccccaccgcagggcgcgggcccagccgcactgtgaacacccggccccagcggccggagagctacgggtagccggtgctcagcgggtgcccatagggttcctcatcggagccattgcccccagctccctcttccttcagacccaggagtcctcgtctcagaccctcattcctcaggcccaggaattcaaatccccagctccttcctccctgagatccaggagtccaggcccccacttccttcttcccttaggacctggaagtccagcttcccagcctcctgcaccctcagagtcgtctcctgggccctcagtactcagcctgcccaccctgaaccagaacagaccccctgctcccctcttcccacaacctgatttcctgctctgggctccttcgttacgacccagtgtcccggccccaggctctccactccctattctcctttcctagtactcagcagtccggagcactcatccttcctgtccttcctcaggatcatagagtacaaaccctcagctgtcttcattcaggaggagttctagtccccagccccaccttcacgaatccagaattccgttcccccattcctgtcgggaatggagtgcgcggtccaggcctccggactgcagctgcaagttccccagcaatgggagcggcctgggccggggaggtagggacccccgcatctgagcgcggcacccaccctacccccaccacgccggcgccagcaccagaagccacaacagcagcgcagcgatacccgcgacatgcctgcaattctccacgcctgcaccccttcacctctatttgatttccaaggggtcttaggggtggagcggggcggagacccgatgtgggaggagtgggcgtctccgggctgctcattccgtggattccccaacccgacgtctccaccccgcccccagccctagtggagctgtgccctggctccccctggctttttttgtgtgtctgcctcagcctgtcttacttagcaactttcgtgcaccagcattttcatggcaacacacctggacaacaggtgcaccctcctgagcccctagcacctttgagtccaatttacttggcctgtaagtgtgtattcctcaatctccgggccacctctgggtcccctgaacgctgtaccctgtacctctgattcctaaatacacaccgactctcaaatacaccacttctgttttttttttttcccttcttagagtttcactcttgttgcccaggctggagtgcagcagtgggatctcggctcactgcaacctccacctcccaggttcaagattctcctgtttcagcctcctgagtagctgggattacaggcatgcaccactaggcctggctaatttttgtatttttagtagagacggagtttcaccgtgttggccaggcagatctcaagctactgacctcaggtgatccgcctgcctcggcctcccgaggtgttgagactacaggccactgcgcctggctcaaatacacttctaaagacacccctggcattcctgtgctctgtgcctgtgattcctaggagctcacacctgagcccttgtcacttccattactcttaggaccctgtgtactatgcttgttccccagatctgccttcaatttccctggcttctgggtgtccatcagtctggcacttctgtgcctctccttagttcttcagggtgcctttctgcatgttgatccccttgtacctccatattatgtcctgccctgaatctaccatctctatccccaaggcactggctcccagatgcccccaaatgttctgtgcccatgctgctgaaccccctggtatccagtcccccaagtccctgtctgaggccaggccatgacgacagacaaacttatccctcattctctcatctatcccccccaacccccatcctagggcatgggctagagggggcagactctggcctggatgggccagggctgcggtggtgggagcagtgaggttggggctgtatttggaacagactgttcaggaatgtggtccaccctcctgcctgtccctgcttggccaaatccagccttcctccaagtgcctggcacagggcccagacctggggagatggtgggcggggggtggactgtgcagagcctaggactggcattgtctctgggagggtctctgtgtatctttgtttcatctctcagtcttgcttgctccctccctccctccctctgtccgtccctccctccctccctccctccctccctccctccctccctcccttccttttttcttttttttttttgagacagagcctggcttctgtcccccaggctggagtgcagtggtacgatcatggctcactgcagcctcaacctcctgggatcaaacaagcctcccaccttggcctcccaagtagctgggaccataggtacacaccaccacgtccggccaatttttgtattttttaaggagacaggatgtcactgtgttgcccaggctggtctccaactcctgggctcaagcaatctttctgccttggtctcccaaactgctgggagtatagttgtgaaccagcgcgcccagcctccctcactctcagtctctgtgtttctgtgttcatctctctctctcctctttctgtctcttcccatctctctctcttttctctcagtctctgcctctgtttgtgtctgttttctgtctctcttttcagtatgtctgtgtcttcccctccctgtatctcccctagtctgtgcttccctttgtctcagcctggcacttctgtgcctctccttatttcttcagcgtgcctttccgcatgtttacccccttgtacctccatattctgtcctcccctatcctgggtcttcctacctgtcagcctttctggaacctggtgactgacaggggttgtggggcaggacccctgctcagagctgctgactccactgacagcgggagtgtggtggggcacagtaagctgcatcctcccccagccctaccccaccctctgtgacaggctttaatggatcctgtttattatggcttctggtttctccccagctcctgactcttcctccgttttgctcgggtgggctgtcctctggaatgtcagctcttctagagcagggattttgtcttgttcgcttctgtatcccagcacttaaagtagtgcccagcacagcagtaggcacttagtaaatgtttgttgaatgaatgcccaatttttcttcctcgctacttctctttgtttttttttttttttttatagagacagggtcttgttaggttggccaggttggtcttcaactcttggtctcaagcagtcctcctgcctcagcctcctaaagtgctaggatcacaggcataagccaccatgcccagcctctttcttccctcccctcccctcttttccctttcttcttctcttcccttcccttctgtctgtcttgttctgtcgcccaggctggagtgcagtggcaccatcacagctcactgcagccatgactgcctgggctcaagtgatcctcccacctgagcctcccaagtagctgggactagaggtgcgtgccaccatgcctagctaattttaaaaatatttatagagaccaggtctcactatgttgcccaggctggtctcgaactcctgggctcaagtgatcctcccgccttggtgtttctatctctttgtaattagactggatttctctgtttctctctttcttttcctccctttttctttttctctcaggtctctctatctctcttcatttctgttctctttatttatctttgctttagggtctctttgtctttcctctctctggacatcactgtctttcccttttctcagtggctctctttctcctcccggtctctgttttccaggatctctttgccatccctgcgtatctgtctcttccttttcctctccatctcttctcagtgtcttcacgtgtttttctccatcatctctctctgcctgtctttctcaggacctctgagtctctctgtctctccctctcttctccctctctcccccgacctctgtgtccctggctgggtcctggggcagactctggtcagcctgtgatgggaacagtgtggggattaaagagctgacatcttaatccccatgtgggcactgcctataagcctcactccagtcagccccatgctcagcagagcatgtcccagtttctgcatcactttggggagaccccgttcagggtagagcctcccaggccacctccactgatggctgaggggccagttccactctgcctgaatctggctcgatgtgctttgggacgcctgcccagcgagaacagccactgtcagcaggatgttagggtattaggtcgggtcccaggttgggagggtacatgcctggggttgccatcctcatcccaaaggggagaatttcagagaatttcagtgagagggtgggagggccgagtgcagtggttcatgcctgtaatcccagcactttgggaggctgaggtgggcagatcacttgaggccagtagttcaagacaagcctggccaacatggtgaaaccccatctctactaaaaatacaaaaattagccgggcatggtggtgcatgcctgtaatcccagctactctagggaggctgaggcacgagaatcacttgagcgctgaaggtggaggttgcagtgagctgagatcatgccactgcactccagcctgggcaacagagtgagactctgtccccccaaccctccaaaaaaaaaaagaaaaaaaaagaaagaaaaagaaaagaggggctcgggattgagggagagagcctcagtcctcagaactcccattgtcattgctcatctgtctttctctggtcatttctctgtttctttccattttctctctcaattcccctgcctcccatttcttagtgtcggtatttctctgcttttctctgtatttaagggtgtctgcctctttcttggtctctgacttgtgaattaaaaggtagtagttagaagtgcagtgtctgagtagggcatggtagtgtgcacaggttgtccagaactttgggaggctgaggctggaggatcacttgaggtcaggagttcgagaccagcctgggcaatatagtgagactgcctctacaaaaaataaaaataaaaaaattagtggctgagtgcagtggcttatgcctgtaatcccagcactttgggaagctgaggtaggcagatcacctgaggccaagagttcaagaccagcctggccaacatggtgaaaccctgtctctactaaaaaaaaaaaaaaaaaaaaaattagctgggtgtggtagcgggcgcctgtaatcccagctgctcgggaggctgaggcacgaaaattgcttgaacccaggaggtggaggttgcagtgagctgagatcgagccactgcactccagcctgggtgacagagcaagactctgtctcaaaaaataaaaataaaagtaaattagccaggtgtggttgtggtgcaccctgtagtcccagctactcaggaggctaaggtgggaggatcgcttgagcctgggaggctgaaactgcagtgagatgtgattatgccattgcatcccagcctgagagacagagtgagagcttgtctctaaaaaaaggaaaaaaaaaaaagaagaggaagaagaagaaaaagaagtgcagtgtctgtagcctcagagtctgaatttagataccagctctgcctgtttctgtgtgatcttgggcaactcacttcacctctctgagcctcagtttgctcatctgtaaaaatgtggtaatactgctttgtggccaggtgtggtggctcatgcctgtaatcccagtgctttggggggatgaggtgggaggatcgctttaggtcaggagttcaagaccagcctaggcaacattgcaagaccctgtctctactaaagattaaaaaaaaaaaagttagccaggcacggtgactgtagtcccagctatttggtgatctgaagcagaagcaggaggatcagttgaacccagaagttcaaggttgcagtgagccttgaattgtgccattgcactccagcctgggcaacaagagggagaccctggctataaaagaaataaacagggtaggtgcggttgccggtggctcacgcctctaattccagcactttgggaggctgaggtgggcggatcacaaggtcaggagattgagaccatcctggctaacagggtgaaactcttgtttctactaaaaatacaaaaaattagccgggcgtggtggcgcacgcctgtagtcccagctactcaggaggctgaggcaggagaatcacgtgaaccagggaggcggaggttgcagtgagccaagatcgcaccactgcactccagcctgggtgacagagcgagactctgtctcaaaaaaaaaaaaaaaaaggaaagaaaaaagaaacaaaagcccccaaaacaaaccagagcaaagtagggagacttaaatgaggcattcagaacagtgtgcaaatagggagtgtcatttagtgtcagtgcttgttccatcttagcctcactttgccctgctttccccatctctctgcagtgccctgcatctcttgcatattctctctgatatctctctgctgtcatcttcttcttgatatctctctgctgtcttcttctttttctttcttactttttttttttttggggggggtctcactcctgtctcccaggcgggaatgcagtggcacaatgatagtccattgcagcctcgacctcccagactcaagaaatcctcctgccccactttttgacttttttgtagagtcaggcctcactctgttgtccaggctggtctcaaactcctgggttcaagcgatcctcccgcctcggcctcccaaagtgctgggattacaggtgtgagccacttcgcctggtcctgctatctttttctctgtcttggtttctctgcctcactggcttcaggtcctcgcagcctttaccttcaagcctgtctccaggatacaatttgtcccaccctagccaccctaaaggtgagggcaaaactagccagtgtctccatctctgcagccagctcccttctccccatcctaaatgactctcattctcactttaattcagccaagactggtttgaatctattacaatgtactaagaaatgatacaaaaagcccagaaaagggcgtgccatagaacaagctctgtgggtacaaaaagacatgccacatctgcctctgccctgcagacggggtacagattggagggatgggggaagggcacgcggcaggcacagcatgcagggaagacagcgtgactgccagagggatggaggcagaccgtggaccaagaaggggacgtagcaacccacatgggtgggcctcatcgctcacaggcgaatctggaagggccggggcgttagcgcgggtgcaggcacagctggaaaggccgcggcaaattgccaagacctgagctgagcggggtcaggtcgatgtcctcgggcgcacccagcggctgcagcgaaaagctctgcaggatggcggtgaggtacagaaagagctccatgcgcgccagcgactctcccaggcacagacggtgccctgcaggggtggcaggatggggagcggtggtgagataagatgaggttagaggctgcaaccccacattcccagaggaaaacataagaggaaaggaagacagcagctggggacgtcacagattcacccatgtaaagatgtgggaaagatgctttaaactgtggagcggaatgacctgggctgcttgggttcgaatcccggtgctgtcactactagttttgtgatcctggacaaaccacactttctgggtatttaaaatggggatatgaagactgggcgcgctggcttaggcctgtaatcccagcactttcggaggccgaggcaagaggatctcttgagcccaggagtttgagagcagcctgggcaacacagcaagatcccatctctataaaaaatttaaaaaaaaatgtgcaaggtggcacatgcctgcagtcccagctgcttgggaggctgaggcgaggggatcacttgagcccaggagatcaaggctgcagtgagccatgatcgtgccactgccctccagcctgggtgagagcaagaccctgtctcagaaagaaaaataaaaggagggatagtaatagtgcctcatgaggctgctgtgaatggtaaacacagggaaagcagtgaggctgtaagtagctcaccatgggccatgccctactctaagcattacatcacaattaattctaacaactccaagaggcaggccttagtattatctccattttatagatgtggacattgaggtacagagaagtgaagtaacatacccaaggcaacacagctagggggtgacagatgggatgcaaaccctgctggaatctgggctgcacattcccagcggaaaacataagctcttagctgggctcttgtagaggcagcacttgacgcacagtaggcaatatggtaagttacctattattatgccagttgttttttcttttcctgctactgagtaaagagggaagtatttttcagcagggtaaagaggaaagccaaaaaacaaaacaaaacaaaaaccctagaaccacctcaactgcgccacccagtggagaggtagacaatgaccactcccaagttcaattattattttttcttttaaacattttatatattttttatttttggctagtcagtattttttattttagagaaaggatctcgctctgtcgcccagactggggtgcagtggcatgatcatactcactgtaacctcaaactcctgagctcaagtgatcatcccacctcagcctcccaagtagctgggaccgcagatgcacaccacaccacatctaggtaatttaaaaattttcagtagagaaagggtcttgccatgttgtccaggctggtcttgaactcctggcctcaagcgatcctcccacctcagcctcccaaagtgctgggattacaggcatgagccgatgaacctggcccaagttaaataataattattataattattatttatttatttttttgagacggagttttgctcttgttgcccaggctggagtgcaatggcgcgatctcggcccactgcaagctccatctcctggattcaagtgattctcctgcctcagcctccagaggagctgggattacaggcatgtgccaccatttcctgcctaattttttttcttttttttttttttttgagatggagtctcactctgtcgcccaggctggagtgcagtggtgcggtctctgctcactgcaaggcccgcctcccaggttcacgccattctcctgcctcagcctcccgagtagctgggactacaggagcccaccaccatccccggctaatttttttgtatttttagtagagatggtgtttcatcgtgttagctaggatggtctcgatctcctgaccttctgatctgcccgccttggcctcccaaagtgctggtattacaggcgtgcattcctggctagttttgtatttttagtagagacagggtttcaccatgttggtcaggctaatcttggactcctgacctcaggtgacctgcccgcctagatctcccaaagtgctgggattacaggtgtgagtaactgcccctggctgttaaattattatcattattttttttgagacagagtctcgctttgttgccgaggctggagtacaatggtgcaatctcggctcgccgcaacctccggctcccgggttcaagtgattttcctgtttctcctcaggagtagctgggactatgggcgcccaccaccacacccggctaatttttgtattttaagcagagacagggtttcaccatattggtcaggctggtctcgaactcctgacctcaggcgatccacccacctcagcctcccaaagtgctgggattacaggtgtgagtcaccatgcccagtcccaagttaaattattaatcaacctccccaccttgcttcacgaggattttagtcactacttgcctataggagcagagttgagaggaggaatgaatgtctctgtgcatccaaagctgagaatgggtggaaggaaggagtgagcggatttggcaagtggaattaggatgaggaatgtaggtagaaattgggccagaaagactctgattcctgccctcaccagctgagaagggcatgaaggctggactcttcttgaaggactgattggcatccaaaaaatgctcggggttgaactcctggggcgtcaggaactggctggggtcgtagtggacggtgttaaggagggtgatgacatcggtgccctgtgtgggtgaggaggtggacttagcagtgtaggagggctgggaggctcccaaactcctttccattgtattgggctgggtgtcctggggacttgataaggggtgggtataggtgggtataggactcaatcgggggccaaggaaatatgtgtgggtgtctagggttccaagtgatgggtgctatatgctgtattattggggactttggcagggatgtgggaaacccccaccctttgtgggagcagatgtggggtttctggggaaaaggaggggtccctgagaatagcgtttaggcccagggatcctccagatgaagttccacaccccagggcttccagggaggggttctaggaaggggatttgtcacggtgaaggggtctagtccagtatgatatgagatggggtcctggcaaaggcctgagcttctggatttaagggtctgagatgtctgtagctagggcttgggatgccagttgctaaggcctggggtgttgattgctagtgcctgggatactgcttgcgagctgcaagagcctgggatgcctcctcttaggttgcctgatgtcgtttgccaggcctagcgcaccttgggtatcaggaagccgtgaaaggccgtgtccctagtgatgcggtgcggcaagttcatggggatgatgtctgcaaagcgctgcacctcgtggatcaccatgtctgtgtaaggcatggccgcgcggtccttcagcgctggcagccgcacgtgtcccaccacaaggttgatctcctcctgcacgtgggctggaggggaagggggaagtggggtggagggtatcaaaccaggctgggaagaggtgtgtccgtatgtggggaggggtctagtcaaagcctcccagcgctgggcgccactgctggggcgtatgtgagaattagctagagctggccgggcgcggtggctcatgcctataatcccagcacttgggaggctgaggtggatggatcacttgagcccgggagtttgagactgtagggaaaagaaagagagatcagactgttactgtgtctatgtagaaaaggaagacatacgaaactccattttgatctgtactaagaaaattactttgccttgagatgctgttaatctgtaactttagccccaaccctgtgctcagaaacacgtgctgtatggaatcaaggtttaagggatctagggctgtgcaggttgtgccttgttaacaatatgtttacaggcagtatgcttggtaaatgtcatcgccattctccattcttgggcacagtgtactgcggaaagctgcagggacctctgcccaagaaagcctgggtattgtccaaggtttcctccaactgagacagcctgagatatggccttgtgggaagggaaagacctgaccatcccccagcctgacaccagtaaatggcctgtgctgaggaggattagtaaaagaggaaggcctcttgcggttgagataagaggaaggcctccatcccttgcatgtccctggtaatggaatgtctcagtgtaaaacccgatcatacattccttctgttctgagataggagaaaaccaccctgtggctggaggtgagctatgctggtggcaatgctgctctgttactctttgctacactgagatatttgggtggagagaagcataaatctggcctacctacacatctgggcacagtaccttcccttggacttatttgtaacctggattcctttgctcacatgttttcctgctgaccttctccccactatcaccctgttctcctgccgcattcccctagccgagatagtgaaaatagtaatcaataaatactgagggaactcagagactggggctagtgcagttcctccgtatgctgagcactggtcccctgggcccgctgttctttctctatactttgtctctgtgccttatttcttttctcagtctcttgtcccacctgatgagaaatacccacaggtgtgaaggggctggcccccttcagagaccagcctgggcaacatggtgaaactccatctctaaaacaaaatagaaaaattagctgggcatggtggcgcacacctatggtcccagctactcaggaggctgaggcaggagaattgcttgaacctgggaggcggtggttgcagtgagccgggattgggccactgcactccagcctgggtgacagagcgagactccatctcaaaaaaaaaaaaaaggaaaaaaaaaaaagagttagccagggcctgggaggaagtgggtcagtgagggcgaaaggttggcttgtgcaagggcctgggcgttgggttgtgtgggtggggcttcagggagggaggcctggaatccaggacctgatgggatttcaggagcagtttcgggaccctacttgctggacggtggatcgagtgggtggactgtgtgggagggctggagatcagaggcagagcaggggttatacccagaggtggagcttggggaggtggagtagcagacagagctccgtgtgtgggccaggctgtgtgggaaaggtagggttccctggcaagtgggtggctggggctctggggcagagttctgggaggactgttagctgggctctgaagccagcatgcagtggtggacacggtgggcacaaagcaagactaagcaggtggaggcgggagcggtggctcacacctgtaaccccagcactttgggaggccgaggtgagaggattgcttgagcccaggagttggagaccagccagggcaacacagcaaggctctgtctgtacaaaaaataaaaaattagctgagtgtattgagtgtggtggtgcacgtctgtactctcagctattgataaggcggaggtgggaagatcgcttgagcccgaggtcggggctgcagtgagctgtgattgtgccactgtacgcctgggcgacagagtgactctgtctcaaaaacaaacaaaaaactaagcagagctgggtgcagtggctcacgcctgtaatcccagcactttgggaggccgaggtgggtggatcacttgaggccaggagtttgagaccagcctggccaacttggtgaaaccctgtctctactaaaaatacaaaaattagctggatgtggtggtgtgcacctgtaatcccagctacttgggaggctgaggcaggagaaatgccttggactcagggggcagaagttgcagtgagccaaccgagatcatgccactgcactccagcctgggtgacagagcgagactctgtctccaaaaaacaaaacaaaaacaaaaaaaccaacaattaagcgggtgggatctgggtcgggattcaggcaggctgcgtggacctcgtgggccacgtggtgggattggcctccgtgtgggtttgtgggtttggctgtggaatcctggtgccagcaggaggctatatcagacctgggaggcgggactggaggtggggtcgtggttccctgctctggggtgaggctggaacacatgggcacctccacgctgctgtgtgggtgggcctcaccttgaactttcgggtacttcatgaatgccaggaaggcgtggcgcagcgtggtgcccaccgtctcggtgccgccaaagagcaggttatgtgtggtcatcagcagggtatccatgtggaagtggctcagcgggtcctccttcttctgccgtggtagaggggtggggatatgagccagggatggagaccccttcactctagaccagtacaactgctgctgggggcccattcagtcccagctgggtttaactttctttccctgggagagctggggaacgcagaagggcagggcagggaaaatctcagctgcagggcctacaattaacttcttggatagagcttgaatgacttcttgtttttttaaaaaatacattttatgtatgtatgtatgtatgtatgtgtgtatgtatgtatgtatgtgtgtgtatgtgtgtatgtatgtatgtgtgtatgtatgtctgtatgtgtgtatgtatgtatgtgtgtatgtatgcatgtgtgtatgtgtgtatgtatgtgtatgtgtgtgtatgtatgtgtgcatgtatgtgtgtatgtgtgtatgtatgtatgatgtatgtatgtgtgtatgtgtgtatgtatgtatgtatgtgtgtgtgtatgtatgtgtgtatgtatgtgttgtagagactgggtcttactatattgtccaggctggtctcgaactcctggactcaagcgatcctcctgcctcggcctcccaaagtgctgggataacaagcctgagcaactgccccctccgccctgccccacctcctttgatgacttcttaatgagctgtaagttggcggtggctgcgagtggctcctggctccagcccagctgggccagatgcttcagcttctccagggagaaggtcccccaaccctgccccatctggggtccctgtgggtttgaggcaggggcagcaggagaatttcaggtcagactagaggtgggatttccaggtagggattacctctgccatcttggtgaggaagcagtggatgaagtcccggggagatctggggtctagcgaggcctggtggtcgtggacgctgtgggcgatgaggtctctcaggcacttgaagttctggaagatgcgttggtgcggcccaggcacccagttcaggaggctcgggaagatgtcgtacaactggggaccagacagagtaggagggttttggaggaggacgaagggtgttcaggggcgaatggggtcagtgtggattaggtaggcagggacagggtctcaaagggcagccaggtccggggtgggggttggggctgagggggagtgggaaggaggcagtggcggccataaatgctcagtggaggggagtgggcgtggccgtgtaactctgggtggggtcagatgggagggggcgggccctgggcgggccattcacagccctttccccgcccactgtttcctctccattcctagatcctgcggaccccacaccctgcccctgctggactcagttggctgacctcgccccaggggctgctcatgatttgaaagttgtcattgataaggcggataatggtgagcagacgctcatcatcatagtcgaagcggctgccgaagagcacggaacagataatgttggaccgtgagcgactcagcacaaacgtggggtcaaagggctcgcctgagggtgaagaatggaatgggtcaggaagacgcgatgtgcagcacaccagacctcatgcagcaacaccattaatttgcacaacatccgactcaaccatggcaacgtgtcttacggtgcaaacacgggcacatggtcacaacatgctgcttaacaacaccccaaaagcatctgtcaatgccacagacagcaccgaacccacagcttcctgcagcacatcgacagcaacaacgcccaaccacagaacaggttggcaacacacacacagcacgcgacatagcacaaggcaatcatcaggcatcacggaacacaacaacacagggcaacagaacacccagcaaatacgatcacagtacatgccaacacacgacacgcagtgacctaatagccagcccggaaacatcccaagacacggtaaccacacaccaacacgtaatgccagcataccgctacataatcctgccacacaacacacgctagtacacagcaacccagcagacagcacagaacacacgatgtggcatcacaacacatacagtcaaggcagcagaacaaaggacacactatgcagcaacgcaacaacgttggcagccagcagatgacacaatgcaaaatcacatgcagtgcctgacaactctacaatctcacccagaaatatctcaacacaacacgtagcatctggccgtccaacagctgaacagaccatagtaaatactgaacaacacatttctttctttccttttttcgagatgaaatctcgctccgtcgcccatgctggagtgcggtggcacgatctcagttcactgcaacgtctgcctcccaggttcaagagattctcctgcctcagcctcccaatgagctgagatcacacccggctaatttttttgtatttttagtagagatggggattcaccatgttgtccagactggtctcgaactcctgacctcaagtgatgtgcccaccttggcttcccaaagtgctaagattataggcatgagccaccgcgcctggtctagtttttgtattttttgtagatacagggtttcaccatgtcgcccaggccggtttcgaattcctgagctcaagtgatccaccaccttggcctcccaaagtgctaggattacaggcgtgagccaccatgcccggccaaaacagcatatttcaacacagcacccaggacacaatagcacagcccaaaaaaccagatctggagttagatggacgcggtttgaatcctcgttggtctcttagccttggtgtgacttgggcaaactgacttcctttttccgagcctcagtcttctcatctgtaaaatgggcctgatggcactcctctcatcctggggctactataaggagtcagtgagtgtgtgactgggagtcagtgaagggcctgacccattgcaaggctgttacagatcatggtgttgtggcaggttgtaatgccccccaaaagatgtccaggtccttatccttacaacctgtgaatttgttaccttacatggtaaaaaggaccttgcaggtgggattaagttgaggattttgagatgagaagtttactctagactgtctggctgggcctaatgtaatcacagggatcctttttagagggaggcaggagggactgagtaagaaaagataatgtaggctgggtgtggtgggtcacacctgtaatcccagaatatattgggaggttgaggaaggaggattgcttgagcacaggagtttgagactagcctgggcaacatagcaagactccctctctataaaaagttaaaagaatgagttgaatgtggtggcacatgcctgtaatcccagctacttgagaagctaaggcgggagaatcagttgagctcaggaggtcaaggctgcagtgagccaagaccataccactgcactccagcctgggcaacaagagtgaagcttcatttcaaacaaacaaacaaacaatcaaacaagtaaacaaacagaccccaaactattattttacttctggggcccagaattccaaaatcagcttcactgggataaagtcaaggtgtcagcagggctggtacctcctggagccttgataagaggatccatttcctcgccttttcagcttctggtcgcccctttattcctttgtgcgaagccccttcatccatcttcaaagcacatcactccagtctctgcttccatcctcacattgtctctctctggctcttcctgcactcctctttttttaaaattaatattgccacattattttaaattatgtacaaagacctaacatgtcactcagggaccatttcacccactgctctatttagccgccagtctcttcagcaatggtgagggtttggtgtacacattatttcatcacccaggtaataagcatagcacccgacaggtagtttttcggtcctcaccctcctcccatcttaccctcaagtaggccctgctgtttgttgttcccttttttgtgtcaatgtgtagtcaatgttcagctcccacctataagtgagaacctgtggtgtctggttttctgtccctgcattagttcacttaggatagtggcttccagctccatctatgttgctgcaaaagacattatcttgttcctttttatggctgtgtagtattccatggtgtatatataccacattttctgtctttctccttccttccttccttccttcattccttctctctctctctctttctttctttcagacagagtcttgctctgttgcccaggctggaatgcagtggtgtgatctcatctcactgcaacttctgcctcctgggttcaagtgacttctcctgcctgagcctcccaagtagctgggaatacaggtgcccgctactatgcctggctaatttttttgtatttttagtagagacggggtttcaccatgttggacaggcttggtctcgaactaccgacctcacgtaatccacccaccttggcctcccaaagtgctgggattacaggcgtgagtcaccacgcccagcccacattttctttatccagtctaccactgatgggcatttaggttgattccacatctttgctattgtgaacagtgctgctgtgaacaaaggtgtgcacgtgtcttcatggtagaacgattgatattcctttgtgtatatactcaataatgagattgctgggtcggatggtagttctattttaagtttttttagaaatcaccaaactacttttcacagtggctcttggcttaaatttggaagcagaggtacactccctttacacctgatttttaaatttcttttctccttgatcagataatatgttgacactatccaaaattcaaaagatacaaaatgatggaaagtgaaatttcttcaacccagtttcccttgccaagttgatactaatgttaccagtttccaggttattccatacacaaatatacaaatagtaacttactatatccactgtatctgtcaggttgggttggaattttttttctttttcttttaagaccgtctcactctgtctttcaggctgcagtgcagtagggcaatcttggctcactgcgacctctgcctcccgggctcaagtgattcttgggcctcagcctcctgagtagctgagattacaggtgtgtgccaccacacctggctattttttgtatttttagtagagacagggtcttgccatgttggccaagctggtcttgaattcctggtctcatgatctgcccacctcagcctcccaaagtgttgggattagaggtgtgagctcctggccattgtgctgggtattctatttgccctaccatctccactctccaccatgacctgtcttttagaagggtggcctctataaactgtaccacccatgctcccttcacctctacattaaaaaaatttttgggtttggccaatggaagtttgagagaagagcaatgtcagattattttgcttggctgtgtgatagcaatggttgtattcctctgccagaaaccatgccctcctgctgggggctctcttttacccctatacaatcagtctcggtttcggaaactactccctctcactgcacctttcaacctaaggatgatgatggcgtctccttattgtaagccatagagtgcttcaacgtcttgtagggttctttcacactgccctccactttgtaaaaagtccctccattggccaggcgcggcggctcacacctgtaatcccagcacttttggaggccgaggcgggcggatgacgaggtcaggagatcgagaccttcctggctaacatggtgaaaccctgtctctactaaaaacacaaaaaattagccgggcgtggtggcgggtgcctgtagttccagctactcgggaggctgaggcaggagaatggcctgaacccgggaggcgaagcttgcagtgagctgagatcgcgcaattgcactccagcctgggcgaaacagcgagactccgactcaaaaaaaaaagtccctccattaagcactcatatttttctgctggggttctgatggaccaagtctatcaaatgaatgcatcataatttgtttaaccaatatcttggtgcatatgttggtttcctatttttcattatgtaaacagttctttgatgaatctaggtgattttgcacactttcttgtacatcataggagacattactagaagtggagttaactgaatctgagagtatgttcttttgtaatttagagaaaagcattcacattactctcctctgaagctgtaccaatttatagttccacaaaccgtaactgagagtaaggattgctctgggaggctgaggtggtagtggatactagcctgggccctatagcgagacaccatctatacaaaaacattaaaaaaagttctactactagggtgtgggagaatgcacctgtggtcccagctgcttgggaggctgaggtgggaggattgcctgagccagggggttaaggctgcagtgaattatgattgtgacactgcattccagcctgggtgacagagcaagacactgtctcaaaaagacaaaaaaacccaccccaaacaaccaacaaaattggaggccatgatttcacacccagtgatcctaatagctcaaattttgaattagagactgtggttttaacatctgctaaattccttatgttgaggaatcactgagtcaaaggtttcagcctctttccaagggggagagcacgtggacaattacatctcatgcaggcatttggttttatggactcacgtgcttgttacaaaaccagacacagctttagggcttcttattaccttcccccacccgtccttggtagaagagtcaacaaatgacatctaagctgccaacacatattggaaaatgtttgaaacttgagatctgtggtttattatgaaacaggcagtgccctggagtttgaattttttcccagttggtcttagtaccctgtctgcagattgaggggaaagggcaggaaggggagtaaatgtagttaagagcatagcctcagctgggtgtggtggctcacgcctgtaatcccagcacactgggaggccaaggagggtggatcgcttgaggtcacaagttcaagaccagcttggtcaacatggtgaaacccccatctctactaaaaaatacaaaagttagccaggtgtggtggtaggtgcctataatcctagctactcgggaggttgaggcaggagagtcacttgaacccgggaggcagaggtttcagtgagccgagattgtgccactgcattccagcctgggtgacagagtgagactgtctcaaaaaaaaaaaaaaaaagcatagcctctagagtcaaacagatctgactactacatctgtgctaggtactttcagtggttgaatcttaatgattctgactctgtttgctcacatgtaaaatgtggatgatcatagaacctttatcacagatttgtgaagactgcattgcacactccatgaaaagttatccttagcacagcatcaggcacagggaagctcaacgccttgaaggtgctgtttttatttctaggtccctaagatcttcctcgtcctccttatggctcccccctttattctccatatttgttccttccttgaaagtcaagggtgcaggaagaagatgatatcctggaggccaagcccacacaattaggacatgtggtggacattcacctgttcttagatccactgctgctcttcctctgcttgtctatcacaaggggctgacacctgcacactaattctgtcttgagggagactgtgtaggggaacatggccatttgagttcattaggaaagggttttgaggtcaggacatgggtatctggtgtacatgggagtttggtggcctctattgtaggaggctttggaaatgtgtattgttgggaggtcctgagggaggaagtttgggatgaacatggagattctaggctgtggaggaagatgtaacatggctattggaggattctgggaccttaccttggtaccttggtaccttggtaatgaggacatcttcagctttatttttatgtatttacttttttttgagatggagtctcactctgtcacccaggttcgagtgcagtggcgtgatctcaaaatactaaaaattagctggctgtgttggtgggcacctgtagtcccagctacttgggaagctgaggcaggagaatcgcttgaacctgggaggcagtggttgcagtgagctgagatcacgtggctgcacctcagcctgggtgacagagtgagactctgtctcaaaaaaaaaaaaaatgttcatccctcagctgctcagccggcagtcgttcttttctcagtagctgttttctcctcagctttgtggagtctttccctcagcctgtgcagctctgtattcagccaatgatttgaggccactgtaagcagctctttccctttggagctctttttgtaagcaaaagctcagtttcttacgtaagaaaacccaattccccttgaggaagagaaagagctggagtcctttaaaattaactgcctgtttttctgtggctagggagccttatctctccctttgccaggcattgtgaagactctgtttctctagctgtgcagctgcaaggtcactagacagataatctcaagtcgtaaaatatgccgttccttgaaaagtaagaaatgatgtaatgcatgtctctactgaataagtgtctttgtttctcgcttctgttgtatgcttccccctgcacagatctcttcctgccccagaaatgcttaaaaggtaactggactctttgtttggggctcagtcattttggatgttgatctgactgggccggtgcacctaaataataataagaaatcctcctcaacccctcagtctctctgattcctaaattatctcactgcaaaggcaggagaattgcttgagcccaggagtctgagaccaacctgggcaacatagtgagaccctgtctctacaaaagattaaaaaattagccaggcattgtggcgcatgcctgtggtcccagctactcgggaggctgaggtggaaggattgcttgagcccaagaggtcctggctatggtgagctatgatcacaccactgccttccagcctgagtgacagagcaagaccttgtctcaaaaaaaaaaaaaaaaaaaattgggctgggcatgatgccccaggcctgtaatcccagcactttgggaggctgaggttggtggatcacctgaggtcaggagttcaagaccagcctgtcaaacgtggtgaaaccctgtctctactgaaaaatacaaaaattagccaggtgtggttgtgtgcacctgtagtcccagctactcgggaggctgagacaggggcctaggattaaataaggagttttggcaaaactaggctggaactccaaaacctgctacataagtactcacgagggttgctagttattagtattattactttgttgttatttggctctggtcagatttcaattaacgtcacaataggatttaaacatttcttttattatttttaagattttaggccaggcgcactggttcccagcacgttgggaggccgacgggggtggatcaccagaggtcaggggttggagaccagcgtggccaacacagtgaaaccccttttttactaaaaatacaaaaaaattagctgggcgtggtggcatatgcctgtaaccccagctattcgggaggctgaggccaggagtttgagactagcctggggaaatagtgagaccttgtctctaccaaaacaaaacaaaacaaccaacaacattaggccaggcgtggtggctcacacctgtaatcccagtactttggggggctgaggcgggtggtggattgcctgaggtcaggggtttgagaccagcctgggcaacatagtgaaactctgtctctactaaaatacaaaaattagctgggcatggtggtgggcacctgtaatcccagctacttgggaggctgaggcaggagaatcgcttgaacctgggaggcggaggttgcagtgatccatgatccggccattgcgctccagcctgggtgacgaaagtgaaattccatctcaaaaaaaaaaaaagttagctggatgctggatgtggtggcatgtgcctatagtcagccactcagaaggctgaggtgggaggatcacttgagcctaggagttcaaggctgcagggagccgtgatcataccactgcactccagcctgggcaacacagcagactctgtctcaattaaaaaaaaaaaaagcgcagaagaatattggtttatggagagtattattttaagttttagaaattttctatgcaaaacaaacaatggaaaataagaaatgcattactctataataaaatatagccttttctctcccatatatatatatgagtggataaaaacagtcataacttcctacacatttaatcctctatactaactctcatacccacttaccactccctcaatgacaaacataccaaaaagatgctaaataaatgaaaacaatactttgtattcttaactatgtaaagtattgtacttaacaggtattttcttggctgactggttctccatacccaacaaacacagtgatgtcaactctcaccactcatattaaacaatatagccattgctgtaaagtacaaaagagaaatgcagtacaaattgaaaaggaggaaataaaacttttattcatcgctgatattatcagatacataaaatcccaaggagacaaaagctactactaatgagattagaaggatcccagaaacagacacagacgtgcacacacacctccccacagacacagatacacactcacaacacactcagaagtacattttattttattttgagacagtctcgctgtgtcacccaggctggagtgcagtggctccatctcagctcactgcaacctccgcctcctgggttcaagcgattctcctgcctcagcctccccagtaggtgggattacagatgtgcaccaccatgcccggctaattttttgtatttttagtagagatggagtttcaccatgttggccaggctggttttgaactcctgacctcaagtgatccactcgctttggcttcacaaagtgctaggattacaggtgtgagccaccacacccagccagaagtatcttttaaacaggatttttaaaagtgggagttgaccctttccaaaatctggagttgggatgggcattagtggtttggagaggaaagagcaggtgtgttgtggctgggaggcgattcctttcagcaccttgggtgatgtctgaggccatacccactttctgtgctatttttgggattatgatgattaacccacactccctttgttcctcccatgtaacctggattcttgggcattcaaccaatattaaacccttcctctgaaaaattcctggattgacaagagcacactggacccatttccattccccatcgtgatcaataggtatcaaaagaaatgatagcttcttagaatagaaatttgcagccactggggaatgtagttcttaaatgtgaatacagaagaatctcttattacaaaattctgtatggctctggatttaagattttgttattttttatttttgagacatggtctctctctgtcactcaggctggagtgtggtggcatgatctcggctcactgcagcctctgcctcccaggctgaagcaatcctcccacctcatcctcccacctcatcctcctgaggagctgggaccataggtgcgcacgaccacacccagctatctttttgtatttttatattttgccaagttgcccaggctagtctcgaacttctgagctcaagcaatctacccaccttggcctctcaaagtgtcgggattacaggtgtgagccactgcagacagccaggatttaagattttaagagatattgaaagccttttgttataataccattgaaaacataaaatacttaaaattaacaaaagttgtgcaatagcataactacaaatcattgatgagagaaattaagtatctaaatgaagagatttatcatggccacgaattagaagacttaatattgttaagatgtcagttcttctgaaattgatcaacagattacttgtaatcccaataaaaatttcagcaggctgtttttgttttggtataaattagtaacatgattttaaaattctaagctgtggctgggcaaggtatctcacgcctgtaatcccagcactttgggaggctgaggcgggcagttcaccttaggtcaggagcttgagaccagcctggccaacatggcaaaaccctgtttctactaaaagtacaaaaattagctgggcatggtgttgggcacttgtaatcccagctacttgggaggctgaggcaggagaatcacttgaacccgggaggcagaggttacagtgagccgagttcgtgccactgcactccagcctgggcgacagagcgagactctgtctcaaaaaaaaaaaaaaaaaaaaaattctaggacgtatatcttttacaactactagtcaaagtaattataaaagagtaacaggccgggcgcggtggctcacgcctgtaatcccagcactttgggaggccgaggcgggcggatcacgaggtcaggagatcaagaccatcctggctaacatggtgaaaccccgtctctactaaaaatacaaaaaattagctgggtgtggtggcgggcgcctgtagtcccagctactccggaggctgaggcaggagaatggcgtgaacccgggagacggagcttgcagtgagcggagattgtgccactgcactccagcctgggcgacagagcaagactccatctcaaaaaaaaaaaaaaaaaaaaaaaagagtaacgaattcagagggctcaccttattttacaataaagtagtgtaggcatatactgatcaatgaaacagaaaagaaggtctagaaacagacacttatataatcaactgatttttgattaaggtgccaaagctattcaatgggagaaaggaaagtcttttaacgaaagtgttggaataactgaatttccttaaggaaaaaatatgcttttgctcttatttcacgctatatttaaaaattaactcataatgactcagacttaaaagtaaaagctataactatgaattcttcaaaagaaagcataggagaaaatctttgtgaacttggggtagacaaagatttttaaaatggaaaaatcgatcatagttctttatttggaaattaaaataaaaatgccataagcaatgacacaaaaaatggcatacctagcattacatttggcttacatttagtgtaagatctacacagtaaaacccgctaaacattgctgtgtcatgttgaggaattttttccttccttcccttccttccttcctccctccctctttcttttcttttctcttttctctttctttctttcctttctttctttcttttcttccttcctttctttctttttctttctttcctttctttctttccttcctttctccatctcttcctcctttcctccctccctcccttttattttccttccttccttccttccttctccctctctttttttttttttttaagacagagtctccctctgtcatttaggctggagtgcagtggcacgatcacagctcactgcagccttgtcctcccaggctcaagccatcctcccaccttagccttccaagtagctgggactacaggtgcacatcaccatgcccagccaatttttgtattttttgtaaagacagggtttcaccattttgccaaggctggtcttgaactcctgagctcaagcggtcctgcctgccttggcctcccaaagtgctgggattacaggtgtgagccaccgcacctggccaatcttttctttttctttcatgaaagttgtactatttatggagtacatgtgatgttttgacacatagacaaaatgtgtaataatcgaatcaaagaaattcggatatccataacttcaggcatttatcatttctctgtattaggcacattccaattccactctcagttattttgaaatatactataaatcattgttaactacattcaccctattgtgctaccaaacactagatcttattctttccatataactgtatttttgtacccattaaccatctcctttttatcctcccttctccactaccctttttagcttctgctaaccatcattatacctctacctccatgagttcaattttttttagctgtcccatagtagtgagaacatgtggcctttgtcttcctgtgcctggcttgtttcacttaatgtaatgtcctccagttgcaactgtgttgtaaatgcaggatctcattcatttttatgactgaatagtactcctttttgtgaattttctttatccattctatccacattttctttatccattcatctgttgatggacagtcaggttatttccaaatcttggctactgtgaatagtgctgcagtaaacataggagtgtggatatatcttggatatactgatgtcttttctttggatatatacggtgggattgctggatcatagggtcattttatttttagtgttttggggaacctccaaactgttttccatagtggttgtactgatttagatttccaccaagagatatgtatgagagttcccttttctccacattcttgccagcatttgttattgcctgtcttttggataaaagccatttgaactagggtgagatgacatcttattgtagttttgatttgcatttctctgatgataattatgttgagcactgatatggtttggatctgtgtccccaccaaatctcatgttgaattgtagctcccaatgttggaggtggggtctgctggagggtggttggatttctcatgaatagtttcatactgtcctcttggtgctgttcttgtgatagtgagttctcatgagatttggttattcaaaagcgtacagcacctccccgctcactctctcttgctcctgcttccgccgtctaagatgccttactccctctttgctttctgccatgattggcagtttcttgaggcctctccagaagcagaagctgctgtgcttcctgtacagcctacaaaactgtaagccaattaaaactcttttctttataaattacccagtctcaggtatttctttatagcagcgtgagaatggattaatacaagtctcaggtatttcttttcttttttttgagatggagtctcactgtgtcgcccaggctggagtgcagtggtgtgatcttggctcactacaacctctgcctcccaggttcaagcaattctcatgcctcagcctcccaggtagctgggactacaggtgcccagcaccacgcctgactaactttttttgtatttttagtagagacagggtttcaccatgttggccaggctggtttggaactcctgacctcaggcgatctgcccgctttggcctcccacagtgctggggttacaggcatgagccaccgtgccatcaggtatttctttatagcagtgtgagaacggattaatactagcaccttttcatatacctgtttgccatttgtatgtcttcttttgagaaatgtctattcaaatcttttattaattttaaattggattattagatttttttcctattgagttgtttgagctccttatatttttttgtgaattattctttgtcagatggaaaacttgcagatatttattttcttccactctgtaggttgtctcttcactttgttgattgtttcctttgctgtgtagaagcgttttaacttgatgtgatcccatttgtccatttttgctttggttccctgtgcttgttgggtattactcgagaaatctttacccagtgcaatgtcctggagagctttctcagtgttttctttagtagtttcatgtttgaggtcatagatttaagtctatgatccattttgatttgatttttgcatatgtcaaaaaataggggtctagtttcattcttctgcatatagatgtccagttttcttggcattgtttattgaagtgactgttatttccccagtgtatgaatgttcttggcacctttgttgaaattgaattcactgtagatgtatgaagttgtttttgggctctttattatgttccatcggtctacgtaacttgttatgctagtaccttgttgttttggttactatagctctataatacgatttgaagtcagataatgggattcctccaattttgttctttttgcttaggatagctttggctactctagatcttttgtggttctgtttaaattttagaattgttttttctgtttctgtgaagaatgtcattggtattttgataggaattgcattgaatctgtagattgctttgagtagtatgaacattttaacaatattgcttcttctaatctcactgtgtcgcccaggctggagtgcagtggctccatctcagctcgctgcaacctctgccttatgggttcaggcaattctcccacctcagcctcccaagtggctgcaactgcaggcgcatgccaccgtgcccggctaatttttgtatttttagtagagatggggtttcaccatgttggccaggctggtctcgaattcctgacctcaagtgatctgcccacctcggcctcccatagtgctataattaacagtatgagccatcaagccctgccgtatttcattgtatgaacatattacagttcatttatccattcacttgttgaagaacatcttggttgcttacaagatttggcaattatgaataaagctgctataaacatctgtgcagaggtttttgtgttgctatatgttttcaactcatttgggttaataccgaagaacatgattgctgtagcacatggtaagaatatgtttagctttgcaagaaaccgccaaattgtctttcaaagtagctgtgtcattttgcattcccaccatcaatgaatgacagttcctgttgagccacctccttgtcagcatttgatgttgtcagctttggattttagccattctaataggtgagtagtggtacatcattattgtttcaatttgaaatggctactgacatatgatatggagcatctttccttatgcttatttgctatgtgtatattttctttggtgaggtgtctgctcagatcgtttgcccattctttaattgggttgttttctattgagttttaacagttctttgtgtattttgaatgtaagtcccttatcaggtatgtcccctgcaaatatgttctcctagtctgtagcttgtattgtcattctcttgacaattcttttgcagagcagaagcttctaattttaatgacacagaacttatcaattgcttctttcaaggattgtgcttttggtgttgtatctaataagccatcaccaaacttaaggtcatctagattttctcctacattatcttctagaagttttgtactcactattcatttaggtctacaataaacttggagttaattttcgtgaaagccgtaagggagcttctaagggggacacacactaacttctttgagagtgggcagtgattgtgaaactctcagctgggtcttacaacagaccccagatccatcaggagagcccagccttcagaacccatagtggaatatgtttcatgcatacacggaggagaatatgcagtcatatgctcacatgcatgtctgaacatgatcacacacatgaatatggctatgtcctgatccagagttctctcattctctgtaagtgattctttccttcaacttcttcattaagggatatattgacagaatgtcattaaaattaaaaacttctgctctgcaaaaaattgttaatggactgactctgtatgtccattcatgtctcgttgtgtccctggactgactctgaatgggctacagtggccttatctggtagcaagcacagattacacccgggtattcaaagcatgttgagtaggtgagagtgtgggcatgtgtgcagtgaaggcaggacagccacccgccaggtctctggaaaactccccaggacagggatgttcaggccatgtgatgctatactaagctgttttacgtgaggaataggtgctttttaagaatctgtctagaaggctatgggcacagatctgtgttcaaagattttctgggcacttatgttttgtgagacatcagagacaactttctaagcctcagttttgtcacgtgtaaaatgggcatgaacgcccttcgcagaggtttgtggcaattaggtgagcgtgcaatggtttttgaacaaaggtgacacgggggtacgtgctcaggaaataagagctgctattattactactcttcatagcataatgtaagggtttccttcctctcatcccagctcggaagcaccttatcaaggtgaactgagccgcttctgtttcttctcttccctctagccaccacgccccttcctttccgccatcctgcccccagtcttagctgcgcccctctcccaagcccggtcttggccctgccctttccctggccccgcccaccagacctgcaccggcacagccctcgctcagcggggcaggaagctcatggtgtagtttcgtgggatcgtggcaaagcccacgtgtttgggggacacgtcaatgtccttaggtgactgggaggacttgaggcggaagttctgcatgacggtggtgaagaagagaaagagctccattctggccaggccttctccgaaacagttccgctttcctgaggaggagaggcgggaggggtggaggtgaagcccactctcagtgcagcctcgccccagtaccgacctccagctgcggctctcccagggaggaagggtggaatattatggcctgagagagtttcagaggaggctctgatcctccctgagcctcaatttctttctataagagatgtaacaatggtgaaccaatattgatatattattactaacaaagtccatagtttacattagggtttactctgtgttatacagttctatgggttttgaaaaaggcataatgtcacacatccatcatagatggggtgatccatgccaggtgtagcaatgggaggtttagatgtcctttcctgccaggtacacttgcaaatatgactgctgtgccgtcatctcctttttagggatctgaggaatctgctgtgtgaccctagagaaatacatctacggggaaagatgtttcctttcattttacctgggcgcaggtactgggtgcttggtagttaaggaagtatcagctgctggctcaagggtagattctaacaggaacttccaagctggagaaataccaggctacaccgcagagaggggaggagggtgagggaggcccctgctggtgtgagccgtggcctggcagcaaacagtggtctcttaccgatggaaaagggcacaaaagcatcactcttcttaaactgccccttctcattcaggaagtgctggggattgaagtcctgggggttggagaagaaactggggtctctcagcacagagcccagcatagggtacacttcggtgccctggtagggaggaggaagttgtgtgtgatgaggagggtcgggggattggtgaaagtacacaggggctggagggggaactagtgtgccccaggtaaggggaagtggcaggcatggaggagttggggtcctctgatggaggagctttgggggatagaaggttcacatctctgaaacaggaagtttgggagacatggggtccatgtccttctaggcaggagtttgggggacctgagatttctgtccctatgacaaaaggccgaatggaaagggggcttctgtttcttaagataggaagtttgggaacatgtgtttgattctcctgacacaaagagtctggagagatgcaggactcaggagtgtctaagtggaaaggtggaacggatgtggtggttggggaagtcttttttgactgattgagggagtgggacagggtctagaaagcttctaatgtgggtgggatgctggggacacagagaggggctggaagtccccgtagtctggggggtgggggcggatagcaccttagggaggaagaaatcccgaaacttggtgtcctttttgactctgcgggccaaactcatggggatcacgtctccaaatctttggatctcgtggatcactgcctccatgtagggcatcttggcccggtcctcaaacttgggctgccggttcttgccgatcactctgtcaatctcctcatggaccttggctgggggaggagggggaatgtgtttaggtatctaggggtctcagagcaggaaatgatagtccgaataggcaaaatggggtggatgatatggctccgcctatgagacggaagtagagcattcataacagaacagacatcagccattcgcattgttggagtaggatcctgttaaccaggttgtgccagaatcacaggggaggcacagggaggaacttaggggatgacccggtggaacgggcagtgggcactcagtgggcttgggacagaagtgactgaccaatcagtgcagacattttcaatattttaatatctaatgagactcagctgatgcctaccagctgaatgttgccctgtctctggacagcaagtcacgtctcagggtcccgggatctgggacaggtggggacattgcaccagtcgaaggggaattttgagggtctggggccctccacttccgtccccctccagccttaccctccacctctgggtgcttcatgagcagcaagaagccatagcgcagggtggtgctgacggtctcggtgcccccaatgaagaggttcaacgtggtcatcaccaggtttttcaagtagaactccgtgttggggttcttctcctcctgcagggagagggggctttaggccaacctcactcctcttgccctcagggcccttctagggcttttcctttggatctacctctctttggttcagaccaaaggtggaaagagggaccctagatctaccagactcgctctaggttccagcccttgccctggctgctggctttgcccaaaatgctcttccttctcaccttctttaccttgctgaccatctgtccttcaattatcaacttagctgtcagtttttttttgtttttttttttcttatactgacttggtcttgctaagttgcacaggccggactccaactcctgagctcaagcaatcctccagcctcagcctcctgagtagctggaactgcacatgcgcatgaccatgcaggctcacttactttttaaacaattaattaattttttttgacacagggcctcattctgtcacccagactggagtgcaatgccgtgatcttggctcattgcaacctctgccccccttcgcgccaccatgcccaactaatttttggatttttagtagagacggggtttgaccatgttggccaggctggtctcgaactcctgacctcaggtgatccacctgcctcggcctcccaaagtgctgggattacaggctgttagccacggcacccagccaattgtgaggattattatgatgagggttaatttgaatgggcctgtgtcatctgcctgccccactcccagactgatttccctctgcctggctttgcatctccccgcagtggctgctggggtgtacctcctgcatgcggatgagaaaggagtcaatgaagtcccgtggggaattgggatccagcgtgcgctggttgtgctccaccttcttggctatgaagtcctccagcccttgcagcaactgaaaggcctgttgctgtggtcctggcaggtgtttcatcaccgaagagaacatctcatagagctggggttgcagagagaggatgggaagggaaggacagctgtcacggggcaggagctgatgggaatgggatttgtttcatagcaaggaaggaactgagttaaaggcatctgtctcgttgtttaggtatttcagtggggccggataggaacttatatctaagttttcaggaaggttaggtaccagggccacggtctagtaatttaggtgagaagaactgagacatatatccaggtttcaggtatttaaacgaggctggattggagcacacatctaggtgttcagatattcaagtgaagttgagttggaagacacctgtccaggtgtttagctcttcaggtggggctggtatgaggtgagtgtcacctgtctaggtatttaggcattcaagtaggcttggttggagacagctgtccagatacttactgggtctggattgggggcttttgttcaggtgctcaggtattaaagtggggctggtgaagatgttgaagtggaggggatacctgttgaggtgtttacctatccaagtgggatgcactgggagcacctctgtaaggtgtgtgattggaaagggttggggaacacttatttgtgtgtcagggaacaatctgtctagatatttatgtgtttaaggtgttggttagggcagctgtccatgttttcaggtatttaagtgggtgaagtagagggcgcttggccagatattccagtgggctaatctgggacatttgtgtagatgtgaaatgattatgatgggctggattttgcagcaccaggtgttcaggtatgcaggaggccggttgacgcagtcacttgtccaggtgttaaaatattcagaagaactgggtagggagcatctgttagaaattacggtaagttggggatgggaacacgtgcccaggtgagagagctgagctgagggtatgcatcctgccagcaggctctgttttggggagcatctgttgagctatccaggtgtccttggagacagggtattggacatccatcctgggttctggtgcaactgtccagttgtccaatatcggggactgattttgaggggacactgtctggagggcggtgggagtttggggcacctgtctccaggtaggggagcagttggcaggttgtggtaggggcgtcacgggccgggctgcagccagttacctgccccgtggaggttgacgtgaactggaagattcctagcatcatgcgcaacagtgacaggaactctttgtccttatagtcaaagcggtccccaaagacaatggagctgatgacattggagactgtgcggctcaggaagaaggtgggatcgatattggcgcctgcgggtatggcgggagaagggggttggggagagagtcaactcagaggtctgaggagagtcagaattccaggaggcagggccttgttgagccaaattcccagcgccagactccagggctggaagtgcgggcgcctttccccacctagtccccatccccaggcagaacgcgcgcgggttcctcgtcctgggtgttttccttctcctgcccccgcactcggggtcccctgctcaccgccagtgccccggagggcgtcgatgaggaagcccgcctcctcctggatgcgctcctcgatgcctcgcttgcccaccccgaagtcccgcagggtggcgatggagaagcgccggagctgcttggcgcgctccccgttgctgaataccacgcctggggaggtgaacgcgggaatggagacaggccagggggcggcaggggcaggagcggagcagctccaaggggctccccaagggtggaggagagagggagtagggtgggagagagatggattcagcgccattgcccagcagagctgcaaactcagtcagagaaacacgatgtcgaggtagagagagagagagagagagagagagagagagagagaagagagagaggagagagagagagagagagagagaagagagagaggagagagagagagaagagagagaggagagagagagagagagagagagagagagagagagagagagagaccaggtttaaagaataagacaatcagaaaagaaacagaaaggccagacagagagatgcacatagaaacagagggataaggggacactccatggaggaagggaaggaagtggggagagaaagagagtgatggaggaagaggatggagggaggggaagtgagatatggggagatctgggaggaggaaataaaaatggtgaaagattcttaagctgagctggagaagagagaaaaatattgagatagaaacagagagggtctggaaggaagagagactgttaccaggagatggaggctgaagatgtggaagtaggaataccctgaaatcctaagacagaggaagaagtgagaaagggatgcggagagatgagaaacacagagaagcccagaagctaagagggacaaaaagacaaatgaagacagagaaccagggctggaaaacagaaacccaggatgtccttagagatggagagagaggggaaagaggagactccagtgagagagaataaggaggtggggcagagagaggcagggaggaatcaggacagggacgctggagacaggtgagggatacacatggagaggccacaatgaagggagatggggagggaagaccagactggggactctgccttagcctccagttggcaggagagtcagggagaaggctgggaacactgagaccttcgtgtccacctggccaccttccccctcttgggcaccccctcaccatagcctttgaagacccagtcgaaggtggcttgctcgcctcgcccgctgaactcctcagcctggtccaccagagcctccctgacggcatcatgtccacacagcaccacgacccgccggggccccaagtgaatggtgaacacggggccatagcgctcactgatctgatggaggtgggtgggagtggttagagggagaagcctccactctgaatggggcccagcaccgagatgtcatgtgctgggatgcttcgcacccaggttctcacagtcagggagctggacatcccaagatcctgtctttctgatgctgaaactccaaaactccatttcctaagactctggtccacactggtcaaccccctgccacaaagccccagccaactaggcagcccccaccccgtgccacccatctccctgccttgggacaccttcatgagggagttgtacatctgctctgtgttcagctgcaggtagtttccaatgaagggcaatggggtgggtcccggaggcagcttccccttgctcttcctctgctgccaaacagacatcaagaccattacagtcaggcagaccagcaaggccaccagaagcatccctgaggccagcatggtggtagtgggatgatagatggtgacggctggggtggtttgcctttatactgcctgaaaaagagggatggactttggctgattacataattacctcatttcacctcccaactacatgccccaccatgaatcctgcctagcttgggacacagccagcaagggaggataaggggaccccagggcagctgaacagagagggggcctccagactaaatctgtggtacttcaggaggggtgccgcagggctgtggatttaggagggggcaacagataagctgtagaactgaggagtttggaatatttgcataggggagcacttgggctttggatttggggtctgagagtgagaatgcaccccaaagttgtggatctgggggttccaggggagaggaatccaaaggtctgggttttattagggtaagacaaagtgtggctgtgcatttaggggtcttctgttgtggaggatgcagggttaagggtctcaggaagggggattccaggcatatggacttgaaagtctcggggctaggaagacccagggctgtgggtgtggagtttctgggaggaggagtgtgtagcaagcccagcgggttctcccagaaagcccagcagcccagcactgggtccaggggctgacttgattttgcttttgcccagagctgtctcttgatgcccagaatcctcattggaacctcagagtgaggccaggatgggtgccatagaacctccactgcccatctctgattgggaaggggaggaagaccagagccatatttcaggggaactttccccacacctggagaagagtacctggagttagcggttggcagagggattggctaggtctggagaaatagtaataacaacccccaaatggtggaaaaatctcaagtgtcccaagggttgtccgctggtttccaacccagatcctcagggaaacccactagattgattgtatcatccctattaatattatgattgttgtttatgtttctcattttatataaagatctacagaggacagaaaacagacagtgggcaggggacatgtgtgagtggccctgaactcccatctctcctgctctgtgtacttagttcccctttctggatttggttttcctgccagtggaaagggagtgtttgggaagagaagatcacattcgagggtgagttaagtctcctttaagaatgattcctgctttgtcaggggctactactattagcaggcagagggaacagtggcagaagagattggggtaaactccagtattaggcacagaggcagatcctggggtgggtgtgagtggagaagggatgagtagccctcctgtccttccctcagggaaattcttccttagtaaacaggacagttaccctttggtgagcatggtcgtatacgggaagattaagtctaggtgtgtatgatctggttgaatctttgtaacaatgaggttggttcatcatgatcatcctcattttgaagatgagcagatctagactccataaatcctcttgagtgaggtcacacagggagtaagtgagggagctgggatgtgaactttctcctcaccccccttcattgactggcctagatcaccctgggagtcaagtgcaggccagccttagcaggaggtgagtgctgggactggcatcagcagtggacacactgatgacattggtgggttctgatatcagcatcaggtatggccagggagggaaaggcatcgtgttggctttgggactgcccccaggtgtatgcgaggatgggaaacaagttggcactgaacttgacaccaggagaatattgaagtcatgtttggtgccaagagggctctgtgtgttgtctcaggtgtcattgagggcataagagtgtcctgcttcaggagggcgtaagggtggcaccatatagggtctgaggttggtcccagtgggctgtgacatgagcatgaggcaggtgctgatattggtcctatgtgggtctgagatgagcctcagccagaccctgagaggggccccagatggccacaggacaggctgtggtggttggaccatttagggttgcacctgtcctctgggtcaccaactttggacaagtggaggtgggtgaggttggcacccccaggactgacatcttgctcaaactgttctaggatgctgagctctgagacctgtgtggagggaacaaaggtcagagaacaaggcagagagaggaaagttgtttgttgattttggaggggaagaggtgggaaggaagattagcaccagcttggcagatatcaatcgctctaatcctgttcaccagtctgcacctgggcctggctcctccttttccttcgtgtttcttaaaaaggtgggagacagaaatctggggagtttgtttctcactggggttggcactaggaagtgcactgagtgatcagcaggttgccatgacctggccagggaggggatggggagagacaggttgggagaactctagtatttgtggacatagaggtcaatgaattttggacttgttgattaccctagagcatggagtgagagaatggtgtctgaaatcatgtgggagggacttgtcccagtgggcagtgtcttgggaacaggctttcagagtgagttagtggcgagcccaggaagatccctttcctttgctgggcctcagtttccctttctgaatggatggtgcaatgattaaggcctggattggaatcctaaccttatcctttctttgttgtgtggctttgaacagctgacttcatctctctgagtcttatggagccaagaacagctcctacctctttggctatttaggggagaagtataagtgttaatgcagatgaggtacatggcagtaagtgctcaatgaatggtagttgttctctttaatctgtaggatgaagcggatggatgagatgttccctaagcacattccttgcttttacattctctagtctaaagctcacaaatcttttcctttgggaaggaggaaagggacagagtctttgggaacctccttcgccatcccttcctcagcacagccaagctttaccccatggagctgtgaataggaaattaatccttcatggcctcctggagtgtggtgctgagttaggcagtatctgcggaaggacaggccagcattagactctcaggttattctggttggccctggagccctgcacaggactttgcccacctgtctgtctatgcttgtcttggatcccatctttctatctttctctttctccttccctgcaagtcagtgttcccctcaatcaccctgtgtgctcatgcatctttgtgttttgtgccattttgtccagtgggttctcctggatgcctctgccatgtttatcctcatttatacaactgtgtgtgtgtcattctgggtgcatgcttttagtgtctacgtgtatgtatgtttcagcatgttcatgttgatacatgaatttatgtgtgcaccaggctttgtggtgtgtatgtttgtgcttgataatgggtatccattccaacttatgtctgcacatgcacatgtgtgtgtgtgcctgacagggtgtggcactgtttctcaatgcttgccaatctttgtgtctgtctctgcatacagcatgtgtgcacacatgatttaggggtgtctacgatgtgtatttctgtgtagaacaagatgaatgctgcatattcatatttgtgtgtatacattcacaattgggtgactacatataagtatgtggatgtttttttctttgtttttttttttgagacagagtcttgctctgtccccacgctggggggcagtggcatggtctcggctggaacctctgcctcccaggtttacaccattcatctgcctcagcctgctgagtggctggggctacaggtgcctgccaccatgcccggctaattttttgtatttttagtagagatggggtttcaccatgttagccaggatggtctcgatctcctgacctcatgatccgcccgcctcggactcccaaagtgctgggattacaggtgtgagccaccgtgcccggccagtacgtggatgttttcatgtgttcattctggtgtgtgtgtgcagacttgtgggccatgttgcatacacgtgaacatgtgatattttcctgtgctcatctgtgtttggattaaaacagtcctatcccagctccatttatctgcttgaaaaaacccccagaactgcaggaagctttttatgagcataatcttaattgaactcctgattgcaagactgaggttagctttatcatctccattttgcaaatgagttagataagttcccccaaagccggtcataagtgacttgcttctgcatttcacagctaatgagtgtagagtcttagtatggtcttgtgtgatggtaaattttttttttttgagatggagtttcgctcttttgctcttgttgcccaggctcgagtgcaatggtgcgatcttggctcactgcaacctctgcctcctgggttcaagtgattctccagcctcagcctcccgagtagctgggattatagccaccagacacagctcatttttctatttttagtagacacggggttcaccatatttgtcaggctggtttcaaactcctgacctcaggtgatctgcccacttcggcctcccaaagtgctgggattacaggcatgagctaccacgcctggctgtgaatgtaagtttcatgctgttaatcaccactttggactgctaggccccacctgtttttctttatgaaacattagaaaaactgcttgtactcccttgtatttcttcaaatacttccgtgtaaacatgtaacaaaagatttcaaaatgttagaaaaaaaaagtcttttaataggagggagacttgaccttctatagtgtttgcactctttggaaccttaagcaaagacctagttggccagtatagccctcatgccattggcaatgaagcagtgggggagttggggtattagtggttgtggtcagagagtgaaatgtctgtgtttcacatttcagattgatgacaaggatttggggggtggggctgtgggaatgttggctgaaaatagagtgaagaaggtcaaagaagagaagacagtcaagattctttttttctgagtgtttggatagctcacatccatggccatgaagttcctccctaccaggaaaatggcaggacttagagttcagagatgggacatttagtaaatagtgctacaataaacatgaaagtgcctcaacatactaattttttttttgaggcagagtctcactctgttgcccaggctggagtgcagtggtgcgatctcagctcactgcaacctctgcctctcgggttcaagcaattctcctgcctcagcctcccaagtagctgggactatagacgtgcaccaccatgctgggctaatgtttgtatttttagtagagacagggtttcattatgttggccaggctggtcttgaactcctgaccttaagtgatccgcccatttggcctcgcaaagtgctgggattacaggtgtgaaccactgtgcccggccagctacacactaccagatctcacgagaactcactatcatgagaatggcaagggggacatctgccccctgattcaatcgtctctcaccaggcctctcttccaatattcgggattacaattcaacatgagattggggtagggacacagacccaaactatatcaccttctctgtggtaggttatattgttttatatttttatttttttgagacaaggtcttgcttcatcgccaggctgcagtgcagtggcatgatcatgggtcactgtagccttgacttcctgaggctcaaatgatcctcttatcctcttatctcagtctcccaagaagcatgccaccatgcatagcacattaaaaaatttttcttgtagagagaggtctccttatgttgcccaggctgatcttgaactcctgggatcaagtgattctcctgcctcatcctcccaaagtgctaagattttagacatgagccaccccacccagtgattatattgttttatttatttatttatttattgagacagaatcttgctctgttgcccagactggagtgcagtggtgtgatctcggctcacagcgacctccacctcccaggttcaagtgatacgcctgccttctgctgctgaatagctgggactacaggcgcccaccatcacgcccatctaacttttgtatttttagtagagatggggtttttcgccttgttggccaggctgctctcaaactcctgacctcaagtgttctccccaccttggcctctcaaagtgctgggattacaggggtgagccaccacgcccagcttatattgtgttgaaaatgttttcttctctcccactggtcctttccttaggtaagaattacactttcctctaccccatggacaggcttggctgtctacttgctttggccatgactcctatcaactctttttctttttttttttttttagacagagtttcgctgttgtcgcccagcctggagtgcaatggtgcaatctcggctcgctgcaacctccacctcctggattcaagccattcttctgcctgagcctcccaagtaactgggattacaggcacacgccacaacgcctggctaattttctttgtatttttagatggggtttcactgtgttggtcaggctggtctcgaactcctgacctcaggtgatctgcccgcctcggcctcccaaagtgctgggatgacaggcgtgagccaccgtgcccggccaactctgttttgttttttttttttttttgagaaggagtctcgttctgtcgcccatgctggagtgcagtggcgagatctcagttcactgcaacctccgcctccagggttcaattgattctcatgcctcagcctcctgagtagctgggattacaggcacatgccaccatgcctggctaattttgtatgtatatgtgtgtgtatatatatatatatacacatatacctgtatattcagtagacacggggttttactatattggccaggctagtcttgaactcctgacctcaactgatatgccggcctcggcctcccaaaatgctgggattacagacatgagccactgcttccagcctaactctgttttataccaaaggtctcactgggctccagtaactacttcctccatttccactctcagggatggggtggcaatggagccccactgttatgggcttccaggatttcccttaatgctgccctcaactttgtaaatagtcctatcattaaactctcaattatcctgtttgtgtatgacttatcattcctgctgggatcctaacccacacagcacttcattgtatggatgaaccatttatttagccagttctttaatgatgaacatttaggtcatttccaatctttcactattaaataaaactgcagtaaataaacttgtatataggtgatttttcacatagtcaaatacaactacaggataaattattatatatggagttgctgaatcaaataatgctgtttaaaaataattttgactgatattgtcaaatcatgtatagaggtgtacagccctattagcagaggataaggatggggacttttcctttggagcaagcccagaatcctgaatgttccaacagctgaagatgaggactgctaagagaactcaaggtaaagaacattagatttctggcaaataggtgtaggtgggtatcttgagtaattcattgaataaatgaagtgtgtaactgtgtttgttccccatcttggaatttttaaaaattattgcttttagatggagtctcactctgtcacccaggctgtagtgcagtggtgagatctcgcctcactgcaacctccacctcccaagttcatgcaattcttgagcctcagcttctccagtaggtgggactacagacacacaccaccacacctggttaatttcttttgtatttttagtagaaacggggttttaccattttggcgaggctggtcccgaactcctgacctcaagtgatctaccagccttggtctccccaggtgctgggattatagatgtgagccaccgtacccagaggatattgttgattataattgttacagaagttttcgaaggtttgtattagaaaatgttaagtctcagaggactgtcttagttcattttgtgttgctataacataataccagagactaggtaatttacacagaaaagagacttatttggcttatgattctggtgactggaaagtccagagcataatgccagtgtctgcttggcttctgtgatggctttcatgctgtatcataacatggcatgaggtcgaaggggaagtagacatttgtgaagggtcaacacatgagcggtgtcctcaatttataacagtctgcccttgaaggaatgaatccattcccatgagaacgaatcctgttttgcaaaatgagacctcactcactaccttgagaaaggcaacaagccacccacgagggtggagctcatgtgacctatgtgcctcccatcaggcctcacctcttaaaggtttcacctcccagcattaccgaaccgggaattcaggggttccagcatgaattttgacaggaacactcaaactatagcagaaactatgaccctacagatagtgattgtaatatttcaagtctttggtatagagactgtaatttccaagatttcatgaatctttctttcatacatggaaggctgggtaagtcaaagattttcaaagattttcagcctcctcccaagagacagtacccatgcatggttagggtctgaatgagcaattgttattcaattgtttgttatgaaatatgacatgtggcttttgggtttcttgctactctcttatgcctcccctcagtcagtgggaagcagcccaaactggaattgaagctgtcaacacaaacctgaaaatgttcagaacttgataactatagtataattataaatcgcacagggccctggtagttaaatcacttcacacttgactttatttgcctgtctgtagaataaagagcaggaaagagtcaaacaagatatggtttgagtcagagcactgatactttttgtagctgtgtaactgtggggaggtcagtcaatgcctctcagaatgaatttcctcacctgcaaaataataataataatgacaataataataatgatagaaatgtactactttgatgcactgatgtattacagaaagaaaaaaaggcaaattttgtctttaaactctcagtttaaatcagtaaactagataccttttttttttttttttgagacaacatgtccctctattgcccaggccagagtgcaatggcatgatcataactcaatgcagccttgatctcctgggctcaggggattctcctgtgtcagcctccccagtagctgggattacaggtgcacatcatcatgaccagttaatttttaaattttctgtagaggcgagatctcactatgttgctcaggttggtcttgaactgctggcctcaagcaatcctactaccttggcctcccaaagtgcttggattacagctgcaagtcaccgtgcctggctgaactagagtgcttctatctaatcctataggaatcccttatttcttattgctgcaggatgaaaattaaacacagattttaattgtgtggattgaagaattatatcagaagttgaaatcacatcctcaccaagtcttatatgtgaaagttagggcattggttgggaaggagaggaaccctgatacttcgaatggggatatctgggtagcctcagatgaaactgagtcactctgagcatcctttctgaatgaatgtatcttcccctctcatggtcgaggacactagttttctctttcttataataacaggggagttatcttgaaatgggcagtatattctcctcaatactcaccttgtttatttatttatttatttatttttgaggtggagtctctgtcacctaggctggagtgcagtggtgcaatttcagctcactgcaacctccctcccaggttcaagcgattctcctgcttcagcctccgagtagctgggattacaggtacctgacaccatgcccagataatttttgtatttttagtagagacagggtttcaccatgttggccaagcttgtctcgaactcctgacctcaagtgatctgcctatttcagcctcccaaagtgctgggattacagatgtgagccaacatgcccaacctcaccccatttattattttctgtctacagatccctaattagagtcagatcgcagcatattttgggtgacaagtacaagtatgatcttggagataatagcatatactccaaaataattgcaatgcttcttgtattttgcataggctgaaaccaaagttaatagaaatggtaatataggctgagcacagtggctcatgcctgtaatcctagcgctttgggagaccaaggcgggaggttcacctgaggtcaggagtttgagaccagcctggctaatatggtgaaacctcgtctctactaaaaatacaaaaattagctggacgtagtggcacgtgcctgtaatctcagctaccagggaggctgaggcaggagaattgctggaacctgggcggtggaggctgcagtgagccgaaatcccaccactgcattccaacctgggcaacagactaagactccatctcaaaaacaaaaacaaacaaacaaaaaaagaaatgataatatattataagggtgttagatcaaggagaatagaatataatattagattgggctgaatttgtagatcgtggtatacttaaccagaaattctggattgagtatgttagctcaggcagctttaaatggctctaagaattgagataggtgttgagagaaacttggtctcaagagtgactttaaagtcaatgaacttgagatgccacaacttcatcagcattgttcagaggaaggaatccagaagtttggagagataggaatgttggagtgggtttattgtgtgcaaccctctctgtattgcctcacccactagatcttctatgagtgctcatcatctctcttcatgaaggtcatgaagagaggtctacattaagaacttttgggcttggccaatggaaggttgagagaagagcaaggtcagattatcgtgcctggccatgtgataacagtggttgtattcctctgccagaaaccatgtcctcctgctggaggctctcttttacccctatacagtcagtctcagtttcagaaacttgtccctctcactgcacctttccacctagggatgatgatggcttatccttactgtaagccatagagtgcttcaacatcttgtaggtttccttcacactgccctcaactttgtaaaaagtccctccattggccaggcacagtggttcacacctgtaatcccagcactttgggaggccgaggcgggtggatcatgaggtcaggagatcgaggccattcttgctaacacggtgaaaccctgtctgtactaaaaatacaaaaaactagcctggtgtggtggtgggcacctgtagctccagctacttggtaggctgaggcaggagaatggcatgaacccgggaggcagagcttgcagggagccgagatcgcaccactaaactccagcctgggtgacagagcaagactccatcacaaaaaaaaaaaaaagaaagaaaaaaaaagaaaaaaaaacccctctattaagcactcatattttcctgctgggattctgatgcacaaagtctatcaaatgaatgcatcataatttgtttaaccaatatcttggtgcacattttggtttcccgttttccattatgtaaacagttctttgatgaatctagatgattttgcacactgtcatgtacatcgtaggagacattactagaagtggagttaactgagtccaagagtatgttcttttgtaatttagacaaaagcgttcacattactctcctctgaagctgtaccaatttacagttccaagaaccgtaactgagagtaaggattgctctgggaggctgaggcaggagtggataccagcctgggccacatagcgagacaccacctctacaaaaatatttaaaattttttctactactagggtgtagtaccctagtactgcctgtggtcccagctgcttaggaggctgaggtgggaggattgcctgagccagggggtcaaggctacagtgaattatgattgcaccactgcattccagcctgggtgacagagcaagacattgtctcaaaaaaaacaaaaaaacccaccccaaacaaccaacaaaacaagaggccatgttttcacacccagtgatcttaatagctcaagttttgctttagagactgtggttttaacatctgctatagtcctgatgctgaagaatcatggagtcaaaggtttcagcctctttccaagggggagagcacatggacaattaccatctcatgcaggcatttggttttatggactcacatgcttgttacaaaaccagacacagctttagggcttgttattaccttcccccaacccatccttggtagaagacagtcaacaaatgatatctaagctgccaacacatattggaaaatgtttgaaacttgagatctgtggtttattatgaaacacgcagtgccctggagtttgaatttcttcccggttggtcttagtaccctgtctacagattgaggggaaagggcaggaaggggagtaagtgtagttaagagcatagccttggccaggtgcggtgtctcacgcctgtaatcccagcacattgggaggccgaggttggtggatcgcttgaggtcacgagttcaagaccagcctggtcaacatggtgaaacccccatctctactaaaaatacaaaagttagccaggtgtggtggtgggtgcctataatcccagctactcaggaggttgaggcaggagagtcacttgaacccgggaggcagaggtttcagtgagccgagattgtgccactgcattccagcctgggtgacagagtgagactgtctcaaaaaaaaaaaaaaaaaaaaaagagtcaaacagatctgactactacatctgtgatctgtgctaggtcctttcagtggttgaaccttaatggttgtgactctctgtttgctcatatgtaaaatgtggatgatcatagaacctttatcacagatttgtgaagactgcatagcacactccatgaaaagttctccttagcacagcatcaggcacagggaagctcaacgccttgaaggtgctgtttttatttctaggtccctaagatcttcctcgtcctccttatggctcccccctttattctccatatttgttccttccttgaaagtcaagggtgcaggaagaagatgatatcctggaggccaagcccacacaattaggacatgtagtggacatttacctgttcttagatccactgctgctcttcctctgcttgtctatcacaaggggctgacacctgcacactaattctgtcttgagggagactgtgtaggggaacatggccatttgagttcattaggaaagggttttgaggtcaggacatgggtatttggtgtacatgggagtttggtggcctctattgtaggaggctttggaaatgtgtattgttgggaggtcctgagggaggaagtttgggatgaacatggagattctaggctgtggaggaagatgtaacatggctattggaggattctgggaccttaccttggtaccttggtaatgaggacatcttcagctttatttttatgtatttacttttttttgagatggagtctcactctgtcacccaggctcgagtgcagtggcgtgatctcaaaatactaaaaattagctggttgtgttggtgggcacctgtaatcccagctacttgggaagctgaggcaggagaatcgcttgaacctgggaggcagtggttgcagtgagctgagatcatgtggctgcacctcagcctgggtgacagagtgagactctgtctcaaaaaaaaaaaaatgttcatgcctcagctgctcagccagtagtcattcttttctcagtagctgttttctcctcagctttgtggagtctttccctcagcctgtgcagctctgtattcagccaatgatttgaggccactgtaagcagctctttccctttggagctctttttgtaagcaaaagctcagtttcttacgtaagaaaacccaattccccttgaggaagagaaagagctggagtcctttaaaattaactgcctgtttttctgtggctagggagccttatctctccctttgccaggcattgtgaagactctgtttctctagctgtgcagctgcaaggtcactagacagataatctcaagtcgtaaaatatgccgttccttgaaaagtaagaaatgatgtaatgcatgtctcaactggataagtgtctttgtttctcgattctgttttatgcttccccctgcacagatctcctcctgcaccagaagtgcttaaaaggtaactggactctttgtttggggctcagtcattttggatgttgatctgactgggccggtgcacctaaataataataagaaatcctcctcaacccctcagtctctctgattcctaaattatctcactgcaaaggcaagataattgcttgagcccaggagtctgagaccaacctgggcgacatagtgagatcctgtctctacaaaagattaaaaaaattagccgggcattgtggcgcatgcctgtggtcccagctactcgggaggctgaggtggaaggattgcttgagcccaagaggtcctggctatggtgagctatgatcacaccactgccttccagcctgagtgacagagcaagaccttgtctcaaaaaaaaaaaaaaaaaaattgggctgggcatgatggctcaggcctgtaatcccagcactttgggaggctgaggtgggtggatcacctaaggtcaggagttcaagaccagcctgaccaatgtggtgaaaccctgtctctactgaaaaatacaaaaattagccaggtgtggttgtgtgcacctgtagtcccagctactcgggaggctgagacaggggcctaggattaaataaggagttttggcaaaactaggctggaactccaaaacctgctacgtaagtactcacgagggttgctagttattagtattattactttgttgttatttttaggagtggagcaggttgtatttgtatcttacatcaccggctctggtcagatttcaattaatgtcacagataggatttaaacatttcttttattatttttaagattttaggccaggcacggtggctcccagcactttgggaggctgaggggggtggatcaccagaggtcaggggttcgagaccagcctggccaacatagtgaaactccgtctctactaaaaatacaaaaaaaattagctgggcatggtggcacgtgcctgtaaccccagctattcgggaggctgaggccaggagtttgagactagcctgggcaaatagtgagaacttgtctctaccaaaacaaaacaaaacaaccaacaacattaggccaggcgtggtggctcacacctgtaatcccagtactttggggggccgaggcaggcagtggattgcctgaggtcaggagtttgagaccagcctgggcaacatagtgaaaccccgtctctactaaaagtacaaaaattagctgggcatggtggtggggcaccaggaatctcaggacttgggaggctgaggcaggagaatcgcttgaacctgggaggtggaggttgcagtgagccatgatctggccattgcactcctgcctgggtgacgaaagtgaaattccatctcaaaaaaaaaaaagttagctggatgctggatgtggtggcatgtgcctatagtcagccactcagaagactgaggtgggaggatcacttgagtctaggagttcaaggctgcagggagccgtgatcataccactgcactccagcctgggcaacacagcagactctgtctcaataaaaaaaaaaaaaaaaagcgcagaagaatattagtttatggagagtattatttaatctttagaaattttctgtacaaaacaaacaatggaaaataagaaatgcattactctataataaaatatagccttttctctctcacatatatatgaatggataaaaacagtcataacttcctacacatttaatcctctatactagcttccatacccatttaccactccctcaaagacaaacataccaaaaagatgctaagtaaatgaacaaaatacttggtattcttaactatctaaagtattgtacttaacaggtattttcttggctgactggttctccatacccaacaaacacagtgatgtcagctctcaccactcacattaaacaatatagccattgctgtaaagtacaaaagagaaatgcagtacaaattgaaaaggaggaaataaaacttttattcatcgttgatattatcagatacataaaatcccaaggagacaaaagctactactaatgagattagaaggatcccagaaacagacacagacatgcacacacacctccccacagacacagatacacactcacaacacactcagaagtacattttattttattttgagacagtctcgctgtgtcacccaggctggagtgcagtggctccatctcagctcactgcaacctccgcctcccgggttcaagcgattctcctgcctcagcctccccagtaggtgggattacagatgtgcaccaccatgcccggctaattttttgtatttttagtagagatggagtttcaccatgttggccaggctggttttgaactcctgacctcaagtgatccactcactttggcttcacaaagtgctaggattacaggcgtgagccaccacgcccagccagaagtatcttttaaacaggatttttaaaagtgagagttgaccctttccataatctggagttgggatgggcattagtggtttggagaggaaagagcaggtgtgttgtggctgggaggcgattcctttcagcaccttgggtgatgtctgaggccatacccactttctgtgctagttttgggattatgatgattaacccacactccctttgttcctcccatgtaagctggattcttgggcattcaaccaatattaaacccttcctctgaaaaattcctggattgacgagaccacactggacccattttcattccctgtcgtgatcaataggtatcaaaagaaatgatagcttcttagaatagaaatttgcagccactggggaatgtagttcttaatgtgaatacagaagaatctcattataaaattctgtatggctctgaatttaagattttgttaatttttattttttttgagacatggtttctctctgtcactcaggctggagtgcagtggcacaatctcggctcactgcagcctctgcttcccaggctgaagcgatcctcccacctcatcctcccacctcatcctcctgagtagctgggaccataggcgcacacttccacgcccggctaatttttttgtgtttctgtattttgccaagttgcccagctagtcttgaacttctgagctcaagcgatctatccactttggcctctcaaagtgttgggattacaggtgtgagccactgtgcacggccaggatttaagattttaggggatattgaaagcctttgattataataccattgaaaacacaaaatacttaaagataaaattaacaaaagttatgcaatagtgtaactacaaatcattgatgagagagattaaatatctaaataaagagatatatcatggccacgaattagaagacttaatattgttaagatgtcagttcttctgaaattgatcaatagattatttgtaatctcaatcaaaatttcagcaggctgtctttgttttggtataagttaataacatgattttaaaattctaagctgtggctgggcaaggtatctcacgcctgtaatcccagcactttgggaggctggggcgggcggttcaccttaggtcaggagcttgagaccagcttggccaacatggcaaaaccctgtttctactaaaaatacaaaaatgagctgggcatggtgttgggcacttgtaatcccagctactcgggaggctgaggcaggagaatcacttgaacccaggaggcagaggttacagtgagccgagttcgtgccactgcactccagcctgggtgacagagagagactctgcctcaaaaaaaaaaaaaattctaagatgtatatcttttacaactaccagtcaaagtaattataaaagagtaacaaattcagagggctcaccttattttaccataaagtagtgtaggcatatactgatcaattaaatagaaaagaaggtctagaaacagacacttatatgatcaatggatttttgattaagatgccaaagctattcaatgggagaaaggaaagtcttttaatgaaagtgttggaataactgaatttccttaaggaaaaaatatgcttttgctcttatttcactctatatttaaaaattaactcataatgactcagacttaaaagtaaaagctataactgaattcttcaaaagaaagcataggagaaaatctttatgaacttggggtagacaaagatttttaaaatgaaaagattgatcatagttctttatttggaaattaaaataaaaatgccataagcaatgacacaaaaaatggcatacctagcattacatttggcttacatttagtgtaagatctatacagtaaaatccgctaaatattgctgtgtcatgttgaggaattttttccttccttcccttcctccctccctccctccctctttcttttcttttccttttttattttctttcctcttttctctctctctttctttctttctttctttctttctttctttctttctttctttttcttcctccctcccttccttccttcctttctccctcctttcctctctccctcccttttattttccttccttccttccttccttctccctctcttttttttttttttaagacagagtctccctctgtcatttaggctggagtgcagtggcacgatcacagctcactgcagccttgtcctcccaggctcaagccatcctcccaccttagccttccaagtagctgggactacaggtgcacatcaccatgcccagccaatttttgtattttttgtaaagacagggtttcaccattttgccaaggctggtcttgaactcctgagctcaagcggtcctgcctgccttggcctcccaaagtgctgggattacaggtgtgagccaccgcatctggccaatcttttctttttctttcataaaagttgtactatttatgaagtacatgtgatattttgacacatagacacaatgtgtaataatcgaataaaagaaattcggatatccataacttcaggcatttatcatttctttgtattaggcacattccaattccactctcagttattttgaaatatactaaaaatcattgttaactacattcaccctattgtgctaccaaacactagatcttattctttccatataactgtatttttgtacccattaaccatctcctttttatcctcccttctccactaccctttttagcttctgctaaccatcattatacctctacctccatgagttcaattttttttggctctcccataggagtgagaacatgtggcctttgtcttcctgtgcctggcttgtttcacttaacataatgtccttcagttgcaactgtgttgtaaatgcaggatctcattcatttttatgactgaatagtactcctttttgtgaatgtaccacattttctttatccattcatctgttgatggacagtcaggttatttccaaatcttggctactgtgaatagtgctgcagtaaacatgggagtgtggatatatcttggatatactgatttcttttctttggatatatacagtgggattgctggatcatagggtcattttatttttagtgttttggggaacctccaaactgttttccatagtggttgtactgatttagatttccaccaagagatatgtatgagagttcccttttctccacattcttgccagcatttgttattgcctgtcttttggataaaaaccatttgaactagggtgagatgacatctcattgtagttttgatttgcatttgtctgatgataattatgttgagcactgatatggtttggatctgtgtccccaccaaatctcatgttgaattgtagctcccagtgttggaggtggggtctgctggagggtggttggatttctcatgaatggtttcatactgtcctcttggtgctgttcttgtgatagtgagtgagttctcatgagatttggttatttaaaagcgtacagcacctccccgctcactctctcttgctcctgcttccgccatctaagatgccttactccctctttgctttctgccatgattggcagtttcttgaggcctctccagaagcagaagctgctatgcttcctatacagcctacaaaactgtaagccaattaaaactcttttctttataaattacccagtctcaggtatttctctgtagcagcatgagaacggattaatacaagtctcaggtatttcttttcttttttttttgagatggagtctcactctgttgcccaggagtgcagtggtgtgatctcggctcactacaacctccgcctcccaggttcaagcaattctcatgcctcagcctcccaagtagctgggactacaggcgcccaacaccacgcctggctaattcttttgtatttttagtagagacagggtttcaccatgttggccaggctggtttcgaactcctgacctcaggcgatctgcccgctttggcctcccacagtgctggggttacaggcatgagccaccgtgccatcaggtatttctttatagcagtgtgagaacggattaatactagcaccttttcatatacctgtttgccatttgtatgtcttcttttgagaaatgtctattcaaatcttttactcatttttaaattggattattagatttttttcctattgagttgtttgagctccttattttttttgtcaattattctttgtcagatggaaaacttgcagatatttattttctcccactctgtaggttgtctcttcactttgttgattgtttcctttgctgtgcagaagcgttttaacttgatgtgatcccatttgtctatttttgctttggttgcctgtgcttgttgggtattactcgagaaatctttacccagtgcaatgtcctggagagctttctcagtgttttctttagtagtttcatgtttgaggtcatagatttaagtctatgatccattttgatttgatttttgcatatgtcaaaaaataggggtctagtttcattcttctgcatatagatgtccaattttcttggcatcatttattgaagggactattatttccccaatgtatgaatgttcttggcacctttgtagaaaatgagttcactgtagatgtatgaagttgtttttgggctctttattatgttccatcggtctacgtaacttgttatgctagtaccttgttgttttggttactatagctctataatacgatttgaagtcagataatgggattcctccaattttgttctttttgcttaagatagctttggctactctagatcttttgtggttctgtttaaattttagaattgttttttctatttctgtgaagaatgtcattggtattttgataggaattgcattgaatctgcagattgctttgagtagtatgaacattttgacaatattgcttcttctaatccatgaacacagaatatcttttcaatttttggtgtcctcttcaatttcttttatcagtgttttatagttttcattatagagatcctttacttctttggttaattcctaggtatttcattgtattgcagctactgtaaatgagatcacttttgttttgagataaggtcttgctctgtcacgcagagctggagtgcagtgatgtgatcttggctcactgcagcctagacctcctgggctcaagagattctcctactttggcctcccaggtagctgggattacaggcgcacaccaccaggcccagctaatttttaaaatatttgtagtagagatggggttttgacatgttgcccaggctggatttttaaaaatttcttttttaaattgtttgctgttggcagatagaaatgctagtgatttttgtatgttgattttgtatcctgcaactttactgaatttgtttatcagttctaatagtttttttgtggagcctttaggtttttccaaatataggatcatatcatctacaaacaaggataatttgacttctccctttccaatttggatgcgttttttttccttctcttgtctaattgctctagctaggacttctggtactatgtcaaataacagtggtgaaagtgggcatctttgtcatgttccagatcttagaggaagactttcagttattccccattcaatatgatattagctgtgggtctgtcattcatggcttttattatgttgagatatcttcctgctatacctagttttttgagggcttttattatgaatggatgttgaattccatcaaatgctttttcagcatcagttgagatgatcatatggtttttcttcttcattctgttgttatgatgtatcacactgattgatctgaggtgccacctcagttgcaatagaatagagcaccaggtagattgctaaggccctggctcctggacagcatctctattcctccctggggcctggaagaactcaccaccccaaagggaagaacaaaaacctccctcctccctaaactcctggcaactactatcttgtactgtcttcacagtttcatttctccagaatgtcatatagttggaatcatatagtatgtggccttttcagactggcttctttcacttagctacatacatttcaggttcttccatgtccttctgtggcctgatttctttttattgccaaatcatatttcttttctttctttctttcttttttttggcttttttttttttttttgagacaaaatctcactgtgtcacccaggctggaatgcagtggctccatctcagctcactgcaacctccgcctcatgggttcaggcaattctcccacctcagcctcccaagtagctgcaactgcaggtgcatgccaccgtgcccagcttatttttgtatttttagtagagatgggtttcaccatgttggccaggctggtctcaaaatcctgacctcaagtgatctgcccgcctcggcctccgatagtgctgtaattacaggtgtgagccatcatgccctgccatatttcattgtatgaacatatcacagttcatttatccattcacttgttgaagaacatcttggttgcttacaagatttggcaattatgaataaagctgctataaacatctgtgcagaggtttttgtgtgactgtatgttttcaactcatttgggttaataccgaagagcatgattgctgtagcacatggtaagaatatgtttagctttgcaagaaaccgccaatttgtcttccaaagtagctgtgccattttgcattcccaccatcaatgaatgacagttcctgttgagccacctccttgtcagcatttgatgttgtcagctttggattttagccattctaataggtgagtagtggtacatcattattgtttcaatttgaaatggctactgacatatgatatggagcatctttccttatgcttatttgctatgtgtatattttctttggtgaggtgtctgctcagatcgtttgcccattctttaattgggttgttttctactgttgagttttaacagttctttgtgtattttgaatgtaagtcccttatcaggtatgtcccctgcaaatatgttctcctagtctgtagcttatattgtcattctcttgacaattcttttgcagagcagaagcttttaattttaatgacacagaacttatcaattgcttctttcaaggattgtgcttttggtgttgtatctaataagtcatcaccaaacttaaggtcatctagattttctcctacgttatcttctagaagttttgtactcactattcatttaggtctacaataaacttggagttaattttcgtgaaagccgtaagggagcttctaagggggacacacactaacttctttgagagtgggcagtgattgtgaaactctcagctgggtcttacaacagaccccagatccatcaggagagcccagccttcagaacccatagtggaatatgtttcatgcatacacggaggagaatatgcagtcatatgctcacatgcatgtctgaacatgatcacacacatgaatatggctatgtcctgatccagagttctctcattctctgtaagtgattctttccttcaacttcttcattaagggatatattgacagaatgtcattaaaattaaaaacttctgctctgcaaaaaattgttaatggactgactctgtatgtccattcatgtctcgttgtgtccctggactgactctgaatgggctacagtggccttatctggtagcaagcacagattacacccgggtattcaaagcatgttgagtaggtgagagtgtgggcatgtgtgcagtgaaggcaggacagccacccgccaggtctctggaaaactccccaggacagggatgttcaggccatgtgatgctatactaagctgttttacgtgaggaatgggtggtttttaagaatgtgtctagagggctatgggcacagatctgtgttcaaagattttctgggcacttatgttttgtgagacatcagatagagccaactttctaagcctcagctttgtcacgtgtaaaatgggcatgaacgcttttccccttcgcagaggtttgtggcaattaagtgaggtgagcgtgcaatagtttttgaacaaaggtgacacgggggtacgtgctcaggaaataagagctgctattattactactcttcatagcataatgtaaggtttcccttcctctcatcccagctcggaagcaccttatcaaggtgaactgagccgcttctgtttcttctcttccctctagccaccacgccccttcctttcccgcatcttccccccattcttatacccgcctcttccgcgaaccccgccctgaccccgcctttccctggccccgcccaccagacctgcaccggcacagccctcgctcagcggggcaggaagctcatggtgtagtttcgtgggatcgtggcaaagaccacgtgtttgggggacacgtcaatgtccttaggtgactgggaggacttgaggcggaagttctgcatgacggtggtgaagaagagaaagagctccattctggccaggccttctccgaaacagttccgctttcctgaggaggagaggcgggaggggtggaggtgaagcccactctcagtgcagcctcgccccagtaccgacctccagctgcggctctcccagggaggaggggtggaatattatggcctgagagagtttcagaggaggctctgatcctccctgagcctcagtttctttctacaagagatgtaacaatggtgaaccaatattgatatattattactaacaaagtccatagtttacactagggtttactctgtgttatacagttctatgggttttgaaaaaggcataatgtcacacatccatcatagatggggtgatccatgccaggtgtagcaatgggaggtttagatgtccttcttgccagatacacttgcaaatatgactgctgtgccgtcatctcctttttagggatctgaggaatctgctgtgtgaccctagagaaatacatctacggggaaagatgtttcctttccttttacctgggtgcaggtactgggtgcttggtagttaaggaagtatcagctgctggctcaagggtagattctaacaggaacttccaagctggagaaataccaggctacaccgcagagaggggaggtgggtgagggaggcgcctgctggtgtgagcagtggcctggcagcaaacagtggtctcttaccgatggaaaagggcacaaaagcatcactcttcttaaactgccccttgtcatccaggaaatgctggggattgaagtcctgagggttggagaagaagctggggtctctcagcacggagcccagcatagggaacacttcggtgccctggtagggaggaggaagttgtgtgtgatgaggagggtcgggggattggtgaaagtacacaggggctggagggggaactagtgtgccccaggtaaggggaagtggcaggcatggaggagttggggtcctgtgaaggaggagctttggggaatagaaggttcacatctctgaaacaggaagtttgggagacatggggtccatgtcttgctacgcaggttgtttgggggacctgaaatttgtgtccctaagacaaaaggcctaatggaaagggggcttctgtttcttaagataggaagttttggaacttgagtttgattctcccgacacaaagagtctggggagatgcaggactcaggagtgtctaagtggaaaggtggaatggatgtggtggttggggaagtcctttttgactgattgagggagtgggacagtgagtagaaagcttctaatgggggcaggattctggggacacagagaagggctggaagtccccgtagtctagggggtggggaggatagcaccttagggaggaaaaaatcccgaaacttggtgtcctttttaaccctgcgggccaaactcatggggatcacgtctccaaatctttggatctcgtggatcactgcctccatgtagggcatcttggtccggtcctcaaacttgggctgccggttcttgccgatcactctgtcaatctcctcatggaccttggctgggggaggagggggaatgtgtttaggtatctgggagtctcagagcaggaaatgatagtctgaataggtaaaacggggtggatgatacggctccccctatgagacggaggtagagcattcataacagaacagacatcggccattcgcattgttggagtaggatcctgttaaccaggttgtgccagaatcacaggggaggcacagggaggaacttaggagatgacccgggggaaggggcagcgggcactcagtgggcttgggacagaagtgactgaccaatcagtgcagacattttcaatattttaatagctaatgagactcagctgatgcctaccagctgaatgttgccctgtctctggacagcaaggcacgtctcagggtcctgggatctgggacaggtagggacattgcaccagtcgaaggggaattttgagggtctggggccctccacttccgtccccctccagccttaccctccacctctgggtgcttcatgagcagcaagaagccatagcgcagggtggtgctgaccgtctcggtgcctgcaatgaagaggttcaacgtgctcatcatcaggttcttcaagtagaactccgtgttggggttcttctcctcctgcagggagagggggctttaggccaacctcactcctcttgccctcagggcccttctagggcttttcctttggatctacctctctttggtccagaccaaaggtggaaagagggaccctagatctaccagactcgctctaggttccagcccttgccctggctgctggctttgcccaaaatgctctttcttctcaccttctttacgttgctgaccatctgtcctttaattatcaacttagctgtcagttttttttttcttacactgacttggtcttgctaagttgcacaggctggactcgaactcctgggctcaagcaatcctccacccttagcctcctgagtagctggaactgcacacgcgcatgaccatgcaggctcacttactttttaaacaattaattaattttttttgagacagggtctcattctgtcacccaggctggagtgcagtgccgtgatcttggctcattgcaacctctgccccccttcgcgccaccacgtgcagctaatttttggatttttagtagagacagggtttgaccatgttggccaggctggtcttgaactcctgacctcaggtgatccacctgcctcggcctcccaaagtgctgggattacaggctgttagccacggcgcccagccaattgtgaggattattatgatgagggctaatttgaacgggtctgtgtcgtctgcccgccccactcccagtctgatttccctctgcctggctttgcacctccccgcactggctgctggggtgtacctcctgcatgtggatgagaaaggagtcgatgaagtcctgtggggaattgggatccagcgtgcgctggttgtgctccaccttcttggctatgaagtcctccagcccttgcagcaacttaaaggcctgttgctgtggtcctggcaggtgtttcatcaccgaagagaacatctcatagagctggggttgcagagagaggatgggaagggaaggacagctgtcacggggcaggagctgatgggaatgggatttgtttcatagcaaggaaggaactgagttaaaggcatctgtctcattgtttaggtatttcagtggggtcggataggaacttatatctaagttttcaggaaggttaggtaccagggccacggtctagtaatttaggtgagaagaactgaggcatatatccaggtttcaggtatgcaaatgaggctggattggagcacacatctaggtgttcagatattcaagtgaagttgagttggaagacacctgtccaggtgtttagctcttcaggtggggctggtatgaggtgagtgtcacctgtctaggtatttaggcattcaagtaggcttggttggagacagctgtccagatacttactgggtctggattgggggcttttgttcaggtgttcaggtattaaagtggggctggtgaagatgttgaagtgcaggggatacctgttgaggtgtttacctatccaagtgcgatgcacagggagcacctctgtaaggtgtgtgattggaaagggttggggaacacttatttgtgtgtcagggaacaatctgtctagatatttgtgtgtttaaggtgttggttagggcagctgtccatgttttcaggcatttaagtgggtgaagtagagggcgcttggccagatattccagtgggctaatctgggacatttgtgtagatgtgaaatgattatgatgggctggattttgcagcaccaggtgttcaggcatgcaggaggcgggttgacgcagtcatttgtccaggtgttaaaatattcagaagaactgggtagggagcatctgttagaaattacggtaagttggggatgggaacacgtgcccaggtgagagagctgagctgagggtatgtatcctaccagcaggctctgttttggggagcatctgttgagctatccaggtgtccttggagacaggcttctggtgcaactgtccagttgtccaatatcgggggctgattttgaggggacactgtctggagcggggtgggagtttggggcacctgtctccaggtaggggagcagttggcaggttgtggtaggggcgtcacgggccgggctgcagccagttacctgccccgtggaggttgacgtgaactggaagattcctagcatcatgctcagcagtgacaggaactctttgtcctcatagtcaaagcggtccccaaagacaatggagctgatgacattggagactgtgcggctcaggaagaaggtgggatcgatattggcgcctgcgggtgtggagggagaagggggttggggagagagtcaactcagaggtctgaggagaatcagaattccaggaggcagggccttgttgagccaaattcccagcgccagactccagggctggaagtgcgggcgcctttccccacctagtccccatccgcaggcagaacgcgcgcgggttcctcgtcctgggtgttttccttctcctgcccccgcactcggggaaccttactcaccgtgcgtgctccggatggcctcgatgaggaagcccgactcctcctggatgcgctcctcgatgcctcgcttgcccaccccgaagtccctcagggtggcgatggcaaagcgcaggagctgcttggcgcgctccccgttgctgaacgccacgcctggggaggtcaaggcgggggtggagagaggtcagggggcggcggtggcaggagcggaccagttccaaggggctccccaagggtggagcagaggggtagtggggtgggagagagatggattcagtgccagtgcccaggacaggtgcaaactcagtcagagaaacacgagggagagagagagagagagagagagagagagagagagagagagagagagagagagagagagagagaccgggtagaaagaataagagaatcagaagagaaacagaaaggccagatagagatgcgcagagaaacagagggataaggggatactccatggaggaagggtaggaagtggggagagaaagagagagatggaggaagaggatggagggaggggaagtgagatatggggagatctgggaggaggaaataaaaatggtgaaacattcttaagctgagctggagaagagagaaaaatactgagacagaaacagagagggtctggaaggaagagagactgttaccaggagatggaggctggagatgtggaagtaagaatagcatgaaatcctaagggagaggaaaaagtgagagagggaagtggagagaggagaaacatggagaagcacagaagctgagagcaacaaaaagacaaatgaagacagaggaccagggctggaaaacagaaacccaggatgtcctcagagatggagagagaggggaaagaggagactccagtgagagagaataaggaggtggggcagagagaggcagggaggaatcacgacagggacgctggagacaggtgagggatacacatggagaggccacagtgaagggagatggggagataagaccagaccgggggttctgccatagcctccagtgggcaggagagtcagggagaaggctggcaacactgagaccatcgtgtccgcctggccaccttccccatcttgggcaccccctcaccatagcctttgaagacccagtcgaaggtggcttgctcgcctcgcccgctgaactcctcagcctggtccaccagagcctccctgacggcatcatgtccacacagcaccacgacccgccggggccccaagtgaatggtgaacacggggccatagcactcactgaactgatggaggcgagtgggagtggttagagggagcagcccccactctgaatggggcccagcaccgagatgtcaagtactgggatccttcacccccaggttctcacagtcagggagctggacatcccaagatcctgtctttcctggctaggacccggatgctgaaactccaaaactccctttcctaagactctggtccacactggtcaatcccctgccacaaagccccagccaactaggcagcccccaccctgtgccacccatcttcctgccttgggacaccttcatgatggagtcacatatgtgctctgtgttcagctggaggtagtttccaatgaagggcagtggggtgggtcccggaggcagcttccccctgctcttcctctgctgccagacagacatcaagaccatcacagtcaggcaggccagcaaggccaccagaagcagccctgaggccagcatggtggtagtgagatgacagatggtgatgggtggggtggtttgcctttatactgcctgaaaaagagggatggactttggctaattacataatcaccttatttcacctcccaactacacgccccaccatgaatgccacctagcttgggacacagccagcaagggaggataaggggaccccagggcagctgaacagagagggggcctccagactaaatctgtggtacttcaggaggggtgccgcagggctgtggatttaggagggggcaaccgataaactgtagaactgaagagtttggaatatttgcataggggagcacttgggctttggatttggggtctgagagtgagaatgcaccccaaagttgtggatttgggcattccaagggagaggaatccaaaggtctgggttttattagggtgagatggaagtgtggctgtgcatctggaggtcttctgttgcggaggatgcagggttaagggtctcaggaggggggactccaggcatatggacttgaaagtctcggggctaggaagacccagggctgtgggtgtggagtttctgggaggaggagtgtgtagcaagccagcaggtgctcccagaaagcccagcagcccagcaatgggcccaggggctgacttgattttgcttttgcccagagctatctcttgatgcccagaatcctcattggaacctcagagtgaggccaggatgggtgccatggaacctccactgcccatctctggttgggaaaggggtggaagaccagggccatatttcaggggaactttccccacacctggagaagagtacctggagttagcggttggcagagggattggctaggtctggagaaatagtaataacaacccccaaatggtggaaaaatctcaagtgtcccaagggttgtccgctggtttccaacccagatcctcagggaaacccactagattgattgtatcatccctattaatattatgattgttgtttatgtttctcattttatataaagatctacagaggacagaaaacagacagtgggcaggggacatgtgtgagtggccctgaactcccatctctcctgctctgtgtacttagttcccctttctggatttggttttcctgccagtggaaagggagtgtttgggaagagaagatcacatttgagggtgagttaagtctcctttaagggcgattcctgctttgtcaggggctactactattagcaggcagagggaacagtcgcagaagagattggggtaaactccagtgttaggcacagaggcagatcctggggtgggtgtgagtggagaagggatgagtagccctcctgtccttccttcagggaaattcttccttagtaaacaggacagttaccctttggtgagcatggtcatatatgggaagattaagtctaggtgtgtatgatctggttgaatctttgtaacagtgaggttggttcatcgtgatcatcctcattttgaagatgagcagatctagactccataaaccctcttgagtgaggtcacacagggagtaagtgagggagctgggatgtgaactttctcctcgccccccttcattgactggcctagatcaccctgggagtcaagtgcgggccagccttagcaggaggtgagtgctgagactggcatcagcagtggacacactgatgacattggcgggttctgatatcagcatcaggtatggccagggagggaaaggcatcgtgttggctttgggactgcccccaggtgtatgcgaggatgggaaacaagttggcactgaacttgacaccaggagaatattgaagtcatgtttggtgccaagagggctctgtgtgttgtctcaggtgtcattgagggcataagagtgtcctgcttcaggagggcataagggtggcaccatatagggtctgaggttggtcccagtgggctctgacatgagcatgaggcaggtgctgatattggtcctatgtgggtctgagatgagcctcagccagaccctgagaggggccccagatggccacaggacaggctctggtggttggaccatttagggttgcacctgtcctctgggtcaccaactttggacaagtggaggtgggtgaggttggcacccccaggactgacatcttgctcaaactgttctaggatgctgagctctgagacctgtgtggagggaacaaaggtcagagaacaaggcagagagaggaaagttgtttgttgattttggaggggaagaggtggaaaggaagattagcaccagcttggcagatatcaatccctctaatcctgttcaccagcctgcacctgggcctggctcctccttttccttcttgtttcttaaaaaggtgggagacagaaatctgaggagtttgtttctcagtggggttggcactaagaagtgcactgagtgatcagcaggttgccatgacctggccagggaggggatggggagagacaggttgggagaactctagtatttgtggacatagaggtcaatgaattttggacttgttgattaccctagagcatggagtgagagaatggtgtctgaaatcatgtgggagggacttgtcccagtgggcagtgtcttgggaacaggctttcagagtgagttagtggcgagcccaggaagatccctttcctttgctgggcctcagtttccctttctgaatggatggtgcaatgattaaggcctggattggaatcctaaccttatcctttctttgttgtgtggctttgaacagctgacttcatctctctgagtcttatggagccaagaacagctcctacctctttggctatttaggggagaagtatatgtgttaatgcagatgaggtacatggcagtaagtgctcaatgaatggtagttgttctctttaatctgtaggatgaagcagattgatgagatgttccctaagcacattccttgcttttacattctctagtctaaagctcacaaatcttttcctttgggaaggaggaaagggacagagtctttgggaacctccttcgccatcccttcctcagcacagccaagctttaccccatggagctgtgaataggaaattaatccttcatggcctcctggagtgtggtgctgagttaggcagtatctgcggaaggacaggccagcattagactctcaggttattctggttggccctggagccctgcacaggactttgcccacctgtctgtctatgcttgtcttggatcccatctttctatctttctctttctccttccctgcaagtcagtgttcccctcaatcaccctgtgtgctcgtgcatctttgttttgtgccattttgtccagtgggttctcctggatgcctctgccatgtttatcctcatttatacaactgtgtgtgtgtcattctgggtgcatgcttttagtgtctacgtgcatgtatgtttcagcacgttcatgttgatacatgaatttatgtgtgcaccaggctttgtggtgtgtatgtttgtgcttgataatgggtatccattccaacttatgtctgcacatgcacatgtgtgtgtgtgcctgacagggtgtggcactgtttctcaatgcttgccaatctgtgtctgtctctgcatacagcatgtgtgcacacatgatttaggggtgtctacgatgtgtatttctgtgtagaacaagatgaatgctgcatattcatatttgtgtgtatacattcacaattgggtgactacatataagtatgtggatgtttttttctttgtttttttttttttttgagacagagtcttgctctgtccccacgctggggggcagtggcatggtctcggctggaacctctgcctcccagatttacaccattctcctgcctcagcctgctgagtggctggggctacaggcgcctgccaccatgcctggctaattttttgtatttttagtagagatggggtttcaccatgttagccaggatggtctcgatctcctgacctcgtgatccgcccgcctgggactcccaaggtgctgggattacaggtgtgagccaccgtgcccggccagtatgtggatgttttcatgtgttcattctggtgtgtgtgtgcagacttgtgggccatgttgcatacacgtgaacatgtgatattttcctgtgctcatctgtgtttggattaaaacagtcctatcccagctccatttatctgcttgaaaaaacccccagaactgcaggaagctttttatgagcataatcttaattgaactcctgattgcaagactgaggttagctttatcatctccattttgcaaatgagttagataagttcccccaaagccggtcataagtgacttgcttctgcatttcacagctaatgagtgtagagtcttagtatggtcttgtgtgatggtaaatttttttttttttgagatggagtttcgctcttttgctcttgttgcccaggctcgagtgcaatggtgcgatcttggctcactgcaacctctgcctcctgggttcaagtgattctccagcctcagcctcccgagtagctgggattatagccaccagacgcagctcatttttgtatttttagtagacacggggttcaccatgtttgtcaggctggtttcaaactcctgacctcaggtgatctgcccacttcggcctcccaaagtgctgggattacaggcatgagctaccatgcctggctgtgaatgtaagtttcatgctgttaatcaccactttggactgctaggccccacctgtttttctttatgaaacattagaaaaactgcttgtactctcttgtgtttcttcaaatacttccatgtaaacatgtaacaaaggatttcaaaatgttagaaaaaaaagtcttttaataggagggagacttgaccttctgtagtgtttgcactttttggaagcttaaccaaagacctagttggccagtatacccctcatgccattggcaatgaagcagtgggggagttggggtactagttgttgtggccagagagtgaaatgtctgtgtttcacatttcagattgatgacaaggatttggggggtggggctgtgggaatgttggctgaaaatagagtgaagaaggtcaaagaagagaagacagtcaagattctttttttctgagtgtttggatagctcacatccatggccatgaagttcctccctaccagtaaaatggcaggacttagagttcagagatgggaaagaagttggatagatgatagggatgaacagctttttttttttttttcttttgaggtggagtcttgctctgttgcccaggctggaatgcaatggtgcaatctttttttttttttttttttgagatggagtcttgctctgttgcccaagctggagtggagtgctacaatcttggctcactgcaagctccacctcccgggttcatgccattctcctgcctcagcctctgaagtagctgggactacaggcgcccaccactacgcccggctaattttttgtatttttagtagggactctgtctcaaaaacaagacaaacaaaaacaaacaaacatgatgcaactatatgctgcctataagaaactcattttacctgtaaagatgcatatagactgaaagtacatagatggaaaaagatattccatgtagacaaaaaccaacagcaagcagtagtagctataacttataccagttgaaacagattttaaggccgggcgggaacggtggttcatgcctgtaatcccagcactttgggaggctgaggtgggtggatcataaggtcaggagatcgagaccatcctggccaacacggtgaaaccctgtctctactaaaaatacaaaaattagccgggcgtgcacctgtagtcccagctactggggaggctgtggcaggagaaccactcgaacctgggaggcagaggttgcagtgagcagagatcgtgccactgcattccagcctaggcgacagagcgagactccgtctcaggaaaaaaaaaaaaaaaccattttaaatcaaaaacattaaaaataaaaacaaaacaaagtatgaacccgggggcgggggtggaggttgcagtgagccaagatcacaccagtgcactctagcctgggcaacagagcaagactccatctcaaaaaaaaaaaatattctggcagcatcacatttcttagtcccagaaggagggccatgtgactaggcaaaaaatgacccaggttccatttcatgcacacaccctctggagcacaaatctccttctctctatcccacttagacctgggtttctctcttgtccctgtatctctttgtttcgttgcctttctctttgttcatctccacctccaactttttgtctagttggatttctctgtgagccatgggtgcgtccactctttgggttcctcttgattctcttctcagccgtatgtcactttctcagtctctgtctcactgaaacttttttcctgtcttttattctttctgcttctatctccctctctctgtttctttgaattgtcttttgtctctgtgtcctccttgacatttatctttgactcactgaatctctctctctctcatctcaattttgttttgtttgctttgttttgtttttgagacagtctcgctcttgttgcccaggctggagtgcagtggtgcgatcttggctcactgcaacctccacctcccgggttcaagcagttctcctgcctcagcctcctgagtagctgggattacaggcgcccgccaccatgactggctaattgtgtgtgtgtgtgtgtgtgtgtgtgtgtgtgtgtgcatgtatttttagtagagacagggtttcaccatgttggccaggctgatctcgaactcttgacctcaggtgatccacctgctttggcctcccaaagtgctgggattacaggtgtgagtcactgtgcctgtcctcatctctattttgatctcactctggttctgtttctatgcacctcgattttgtctcaatcttgatttctgtctccatcacataatacctggcataatctgccatgctctgaatttctctgcctcaagtcctctgcaattatttttcctctttagcttgcttctactttttagttcaagttcctccactcctggcttcctatctggaggtggaatggtgaagggagctgttctaagagtatttgctctctcccttcccgtctgagtaggaaaaccagactcaccatcaccacacacatgccaccaccctgaatgggtgttaaatgctggggtgtgaggatcagaatgggatggggaggtgaaatctaagagagtcaaaggagatgggctgagctgagtctctactccaagaaagacattctagcagcagatccaagagacagaacgtggcactgtgtgtgagtcactcagttttcgtagaatttccactgcttctggacacaggatgcctcagctcagccagccaaaccccattcccaaaacttacagataccttgagggattcagtttccaagtctgagaatacagtcgtgtgaaaaggacattgaattttgataaatagtatatgtgggtaggatataatatccaggaagttcatttcaggccaataaggctttgaaaatatttggtgcggaaaaggtagtgaatcactttttagattattaaggaacacaatcactaattgcgctggaggagatgttctcctccagagactggggttcagaggtgatccctacaccttagagttttaaaacacacacacgcacacacaccaacacacaatacagcaaagttctttttttcttttttaaatttgatacagcaaagttctgatacaccaacacaagtaatctttgattattgttatttaacatcttgagtagaaaacaagaactttttgaacaaaacctgttcaattgatttatttctcttgttttctaaatcttcagcttactttccttattaacattctagtgttccattacacagtagggtagctgtagttaacgataatacattgcatatttcaaaatagttagaagagaggattttgaatgttcttaccacaaagaaatgataaatgtctcagtaatggatataataattacccgaatttgattgttatacatcgcatacatgtataaaaacatcacactgtaccccacaaatatgtacaattattatgtcaattaaaaaaatttaataactgtttaattagggttatacttaattaagtaacgaacaaagagttttccttgttgtctatcaagactttctaaaacaacatggtctgccagctgtggtggctcacgcctgtaattccagcactttgggaggctaacgggggggcgggtggtggatcacttgaggccaggagttcgaggccagcatggccaacatggtgaaaccacatctctacaaaaatacaaaaattagctggacatggtggtgtgcgcctgtagttctagctacttgggaggctgaggcatgagaatcgcttgaaccctggaggcagaagttgaaatgagattataccactacactccagcctgggtgacagagtgagaatctgtctcaaaaaataaaacaataaaaaaaaataaaacaacatggtttccctgtttgatagatggggaaacaagtcccagaggttaagtgactttcccagtgaagaaaagacagagctgccacttgtacccagattgtctggatcctaaaatcaatagcctaaaaagataataatttgcctcttacaccccaccaagaaattctgttcaattctgttgagctgagagggaagaacagggagactggaaatatgaagaaaggggaatggccccagaggatttccctgtgtgaattcaatttacctttattcaggtgggagattataggttatataaccacccccaatataaagcaatctcttccccgatgacactcaaacccggaaaacttgaatcccagggtgttcagattttggtataagctgatctcccaggacctacttaggcaggatctggtgcccaggacagaacctgttgacctggcaccatggagctgggaggggctgtcaccatctttctggcactccgcttgtcttgcctgctcatcctcattgcctggaaacgaatggataaggcaggaaagctgcccccaggtcctacaccaattcttttcctggggcacctgctgcaagttcgaactgatgctacgtttcagtctttcatgaaggtgagtctgtctgtctcctttaatagggctaaaagcaactaatcctatagccagattcacatagaaacttatgacttctaaaagatagactctcagaaacacagactttgcaaatcttagaattctgaaattccagaatcctaaaatgttggaaacacacattctcagtgcattgaaataagattttcatgatctcaggactttggaatcacagtacattatatttttaaacacaggattctttgactcagcttgtcttagcactttgagacttggtatcatgaagtcttaagattctagaaatttaacatttcagagagagaagtatgaatcttggaatttatcgaatccaggtcccttattttggagatgcagacagtaactcttgtgggaagggatgagcttttgccgagaatgacagaagccaagacttccgtgcctctttcccagtattccttccaagcccagatttaccttggttccttagtaccatgtttatatccctctaaaatcgccatcctctaaaatcctcaactggcctatgcttggtactccagtcagcccctcctcttgtgttttccttcactccaagctcagggagaaatacagccctgtgttcactgtgtacatgggtcccggccagtggtggttttatgtggacacgaagcagtgaaggaagccttgatagaccaagcggatgagttcagtggccgtggagaactggcttcaataaagcaaaacttccaaggtcatggtaggtagcaacaacaacaaaaacaataaaaccggaaatgactgcaatgcactccctatatgccaggttctttggtaagtagtccacatgacttactgtattgactcccttaggagagctgttaacattatactaatgttgtcaatgaaaaagctaagataggccaggcatggtggctcatgcctgtaatcccagcactttgggaggttgaggcgggcagatcacctgaagtcaggagtttgataccagcctggccaacgtggtgaaaccccgtttctactaaaaatttaaaaaaaaattagctgggcatagtggtgggcacctgtaatcctagctgctcaggaggctgaggcaggagaatcacttgaaccctggaggcggaggttatagtgagctgagattgcaccattgtactccagcttgggcaacaagagtgaaactctgtctcaaaaaaaaaaagaaaaagctaagataaaggttagataatgtcacacagtaagtggtaggataattttattttgagcctatgccatctgactccaaactgttttctgtgttatttctgctcctatttttaatggattagtgagatatatatatatatatatatatatatttttttttttttttttttttgagacagtttcactcttgttacccaggctggagtgcaatggcatgatcttggctcaccacaacctctgcctcctgggtttaagccattctcctgcctcagcctcctgagcagctgggattacaggcatgcgccaccacgcccggctaattttgtattttaagtagagatggggtttctctatgttggtcaagctggtttcgaactcccaacctcaggtgatccacctgcctcagcctcccatagtgctggaattacaggtgtgagccactgagcccgggggattagtgatattctttatgcacccatagccaaccctcataccccttatagctaaccttatttctcatcttcctatacttatacacatacctaacccataggtctctgcctccttcacttaggtagatctctttctctcatgcatccatctctaactgcccacatccttcaattccaaggaggctcaccacattctgcctatcaatctatctatctatctatctatctatctatctatctatctatctatccatctatctttctattaccttttttcttctgtccattgatctatattcatcagaaaatccattcattattctttctataaaaatatctttcactctattatctatacttctgtcaattaactttctatttattcatctagtcatcattccttccattcattaatgctttcatcattcatacatctatcaatctctctatccactctccaactgttattcactcagttatttttttatttatccagttccacctctgcttcctgtaagaaacactctttgatctccccctatcattcctgcactgattcccttttcctccacctgagtctggactttttttttttctttcccgaggatcctgcagagagggaaccttactctcttgattgagtcttgaaggttgaggatggcttcctggacagcagagtctagagctttcataatctttccccatcactgcctaagcacagagttgaacacagcaaggggagggaggcagaagcctgagactgagatcttggcaggtgtagctctggccaatggagaacgatggaggattctccgacgcttctccctgaccatccttcgggacttcgggatgggaaagcagagcattaaggagcgaattcaggaggaggccagctacctactggaggagttccagaagaccaaggtatgagggccacaagggggagggccactaggtgactgggtggttatggagctctcagtcacgagaagatgggccttggcgggagaaagctctggaatggaagaagagggaaaatattaagaatccactgagatttctggcagcttccatattaagagtttacatgatcatgcctgtaatctcagcactttgggaggccaaggcgggcggatcatgaggtcaggagatcaagaccatcctggctaacatggtgaaaccctgtctctactaaaaatacaaaaaaattagctgggtgtggtggcgggcacctgtagtcccagctactcgggaggctgaggcaggagaatggtgtgaacctgggaggtgaagcttgcagtgagcggagattgcaccactgcactccagcctgggcgacagagcgagactccgtctcaaaaaaaaaaaaaaaagagtttacatgagctgggcatggtggcacatgcctgtagtgtcagccgcctgtggggctgaggctggaagttgcttgagcccaggagttcaaggctgcagtgagctatgatcatgccactgcacttcagtatgggagacacagtgagactctatctcttaaaacaacaacaacaaaacaattaacatggaagacccttagagaccacttatctagaaactttcatcagtggatctcagggtgggtctgtgagctctcgatatcctacacagattttggtgacatatgactttgtgactcttcttgaagagagtctcaaatttcattccatttgtatatctgtattgtggtaaaaaaaatacataacataaaatttaccatattcaccattttaagtgtccagttcagtagtgttaagtatattcatgttgtgaaaaaaatcttttgaacttttttatcttgcaaatgtgaaactctatactcatttcattgtgtttttaaaggagttcagttccaccaaaaaataaggtctagaaacactggggtctatagagaaaagacaggctgaaaacaaacaaacaaacaaacaaacaaacaaacagagaaaattagataagaggtagaaatagagacacattttctctacacctgaggctccttgcctggtctctatgggtgattaacaggtctatataaaagcttcaaatgcccatgtaccccagaaattattcataaaattgtgtatttgtgaatatgtgcattattctagagaaattgttcccagatctactgatcttgttttacggaaggtgtaggtgagggcaagggaaggattttgttttgttttgttttgagacagagtcttgctcttgtcacccaggctggagtgcaatggcatgatctcagctcactgcaacctccacctcccagtttcaagcgattctcctgcctcagcctcctgagtagctggtattacaggcacctgccaccatgcccggctaattgttgtatttttagtagagacggggtttcgccatgttggccaggctggtctccaactcctgacctcatgatctgcctgcctcagcctcccaaagtgctgggattacaggcgtgagccaccgcgcccagcccggaaggattttttaaattgcctaaatggaattatcggtagaactagacagaattcaggaacttttataatgtgtcccttatcccacttttctccaaatatgagtctctaacatcaacacatttaagtaataataataaaaaataatgattaagctcaactagcttttcttgagtgcttactgtatgccaggcattgtgctaattattttatatggataatgatactgaatcctcatgactcttcaccctttagaacttcaggacgtggaaacacaaaatccccgactttgggaggtcatttaacttaatcttctacttggtgtctgcggcctgtggctgctgtaacaaattaccaggaacttagtcatctaaaacaacacaaatgtattatccttctgttctgaatttcagaagttcaaataggctttcactagctgacaccaacggaccatctgattctctgccttttcggggtgttaaagctgtactccttgtaatcctgggttcacgactctgtcctccatcttcaaagccagcagcgtagcttcttcaagcctctgtttgcttctggcatcacatcttttattctttttcattattttggagagtcttcctctcttgcccacgctgtggtgcagtggcgtgatgtcagctcatgcaacctctgccttctgggttcaagtgattctcctgcctcagcctcctgagtagctgggattacaggcatgtgccaccacacccagctgattttgtatttttagtagagacagggtttcaccatgttggctaggctggtctcaaactcctgacctcaggtaatccaccctccttggcctcccaaaatgctggaattacaggtatgagccactgcgcctagcctcacatcttttttttcaaactccgattctcccgcctctcttttatacagacacacaatattatattgaaggccaatcttgacaacccaggctaatctcttcatcccaagattcttaatttactggcattttcaaagtctctcttgtgtttttgttacccttgtatacatagccttccaggcattaggttttagagacttggaggtggttatctttgatggacattatcgagccaactgccctgccaaagttaaatagaatccgtctccaatcacttctgatctggtccatttgggtaactttagtaatgaggaactcactacttgcttaaggaaaattcccagttttggcccctctccttaataatgcaattcaaaacaagccaaaggatttctcctggtgcagatgagagatgctaacacacttccactcaaatgtttctagtgtcacctccattgtctgagttgtctttcactggtctaaataatcaggccgggtgcagtggctcacgcctgtaatcccaacactttgggaggcagagatgggcaaatcgcttgaggccaggacttcgagaccagcctggccaatatggtgaaaccctttctctactaaaaatgcaaaaattagccaggtatggtagcgcaaacctgtaatcccagctacttgggggactgaggcatgagaatcgtttgatcccaggaggcaaaggttgcagtgagccaagattgcactactgcactccagcctggggtacagagaaagactccgtctcaaaaaaaaaaaaaaaaaaaagaaaagaaaatcaaatatttattggatgcttctatgtgccaagcactgtcctagttccttgccttgcataccagactttatgtaatgtttacaactctatgaccttgtccaaacagcacactcattttgaagatgatgaaacaagttcagaaggtgaagtcactcatccctaaagtgcagaggagtaactccagcagtggtgatcttaatcagtcacataaccgcttgtcatttgtgtcaatcctgtcctagtcacctagcatgcctctttcccattctttaaaaaacccatgtatgagagccaagctgggaccatggctttttggttcttttaagtaaagaccaaatgtcctggcagcgttcaagactccaagctgcctgtctcccgatgtctgatgagtaattgagcatcaccagtgtgtcagttgttaagttaaagaagcgaccaaacaggcctggtgtggtggctcacgcctataatcccagcactttgggaggttgaggtgggtggatcacgaggtcaggagtttgagaccagcttgaccaacatggtgaaaccctgtctctattaaaaatacaaaaattaactgggccggtggcaggtgcctgtaatcccagttactctggaggctgaggagagagaatcacttgaacccaggaggcggaggttgcagtcagccgagattgtgccattgcactccagcctgggtgacaggctgtcaaaaaaaaaaaaaaaaagaagggagcaaacatgcatggcttgcatctgagatctctttctgctggagcttggaatgcatgatttgccctggcttccctaacaaaaacacctgttttattttgttttgttttgttttgtgcccttgtccgctatattttctggccccttccagctaagattcacgaagagattaaccaggtgattggaccacaccggctcccaagggtggatgaccgggtcaagatgccctacacagatgtcgttatccatgaaatacagagactggtagacatcgtgcccatgggtgtcccccacaacatcatccaggacactcagtttcgaggttaccttctgcccaaggtggggttgcaccctcattgcctcccttccactgcactcctctctctccctggttccctacctctgtagcccaacactgatttctcctaactgccctcattttcaccccagggcacagacgtatttcccctgcttggctctgtcctcaaagaccccaaatacttccgctacccagatgccttctatccccagcactttctggatgagcagggccgcttcaagaagaatgaagcctttgtgcctttttcctctggtaggtttctctggtctgacttcctccaggcatgtgctaaatccacccccaagccactggtctgtatttgaagttcaagtcacagtgtgaatttgaaggttatatcatagaaccataaagttttagaatcccagaattagtaaatattaggatgtttgactctgataattagaaaaaaaaagttgggatggtaatagcactaaacagggcataaaccaactggctggctgttaagaacaaaataagacatattttctatttttccagccagatagtctctgaacctttgccattgatcaatgaaagcagccatagacaatatgtaaatgaatgagcatgtgtgtgagcctgaaaaactgtttacggacactgaaatttgaattttgttttatcttcatatatcacaaaagagtcttttttccccaaccattttaaaatgccaaaagcatcctagtttgcaggctgtatgaacacaagcagcagggcaaatttgcccaacagacactcatttgcctactcatgtcataaaatctttatgcagcaacattttaagtgtatgttggcatggcacagtggctcatgcctgtaatcccagcactttgggaggccgaggcaggtggatcacttgaggccaggtgttcgagaccagcctggccaacatggtgaaaccctgtctctactaaaaatacaaaaattagccaggcgtggtgacaggcgcctgtaatcccagctacccaggaggctgaggcacaaaaatcacttgaacccgggaggtgtaggttgcagtgagccgagatcatgccactggactccagcctgggtgacagagtacgaccctgtctcaaacaaacaaaaaacaacaaccaaaagtgtatgtcatttggaacctggagtcaggacagtggttgggaatctggactccactccatcatttagaaatggtggggtcttgggtgagtcacttcagcccccatctgtgaaacagagattaatccctccaaacaattggaagagtggcttataaacagtaagtgttattacgggtgagttttcactttttttcctcaccagtgtctggcacctaataggcatttgacaaacccttgaggaactgaaatgaacacaaccttgaaactcatggatcctatagaaccattccgtcttggaacgggatggaatcccagccatcagagaagtagcaggtcctagctgagcactaactatagatacccactaagcctgtgtaacacccctttataaagcagtcacagtcatgagccctgatgtgcggatgaggcagctgaggcccagtggggtggtcagtccagacacccctggcacccccatgacctgtgcaggtgcaacccttccttctgccctcccctgtgcctgcaggaaagcgcatctgcttgggcgaggccatggcccgcatggaactctttctctacttcacctccacccttcagaacttctctctatgctcgctggtgccacttgtggacatcgatatcacccccaagctctcaggctttggcaacatcaccccgacctatgagctctgccttgtggcccgctgagccacacctcctgcggggcaaggaggaagtggtgaagaatgcagctctcctctcgtgttcaggagcaccccctcttcctcatcttactaatcctcaagcatccctaagaggaggcactatgattacagagtcagccagggtcacctgagaatgtacagctgcgtgtcttcctctcccgtagaagagcaacgccctgtgcaagatttgcacctctgcctgcaggtttcatggtcacatggtcaccgttgcttaggtttctggctgcatcaaattattactgcagtccctgtgtcttcatgttgtccctttttgtgtgtgctctgattttgaccaaaatgtagtctaaaatcctttctccttggttctcatctttacccaccagcccccgaaaagtgaacaaagacctcaagtctgttgagcgtagcaagtttattgagtatggtgtgtgacagcgatgtagggcacagccaacagcttgaaatgtctttcttgacttgttatgagttatagtttctgccagctgctctccagtgacttcccctgggtaaaatgccccatcctcacccatcttgctgactcattacctttctccgccatcatctcttcttctaatcttcctttccagttgctctcagcacaactcccaattccaaatactccccagtccgtttgtttgtttggagatggagtctcactctgtggcccaggctggagtgcagtggcaccatctaggctcactgcaacctctgcctcctgggttcaagggattttcatgcctcagcctcccgagtagctgagattacaggcacgtgccactgcatctggctaatttttgtaattttagtagagatgggttttcgccatgttgcccaggctggtcttgaaatcctgacctcaagccatccacccaccttggcctcccaaagtgctaggattacaggcataagccaacgtgctcggcctccccactccatttttgaggatagctcagttatccccagcttctatcattccctttccagactccattaactgacaaaaacgttccctctttttcatttattcagccaatatttactgaatacccaacaagtgccagcgtagtcttcagggacttgggatccatcagtaagcaaaacagacaaaaactcctgccttcagggagctaacattctagtaaggaaggtggacaataaagcatacatgaaacaaatatgcaaatgacatactgcattagaaaagcaaggctggtaagtgggatatgcattctgtgattggaattgcaaatggatggttaggggtggtttcacaaggtgatggggcaacaagctatgaagatatctgggaagggagtgttcctggcagaaagattaaccaacagcagtggccgggcgtggtggctcatgcctgtaatcccggcacttcgggaggccgaggtggtcggatcgcctgaggtcaagagtttgagaccaccctggccaatatggtgaaacgtatgtctctactaaaaatacaaaaattagctgggcgtggtggcaggtgcctgaatcccagctacttgggaggctgagacagagaattgcttgaacccgggaagcagaggttgcagtgagctgagattgtgtcattacactccagcccaggtgacagtgtgagactctgtctcaaaaaacaaagcaacaaacaaaccagcagagtcctaaggcaggaggctgtgtgcatccaggaatccacagggagcaggtgtagctcgcatggaggaggaagacagagtaggagtgaaggaaacgaggccagggaggcgatggggaccagactgtgtggggtcttgtgggccaaggtgaggtcttggcttttaccctgagagtgattgaggtatttggagggatggtgagcagaggatgacatgtacagacatattttacagggctcacactagctatcatatgatggatacaaaagccaagacctattagcaggctactgcaactggtggtgttgactcagacccagcagcagcagtgaagctgggcagaatatggtagatttgaaatctgtttcactctctgagatggtggggtttgctacggtattgtatatagggtgtgagagaaagagggagttcaggcaggagtccaaggataggatctcatctttgatcacctcttcttcaacctgtcacctccagggaaccttgggacccatgacagtcagggttcctttttttttttttttttttttttagacagagtctcactctctcacccaggctggagtgtagtggcatgatctcagctcactgcaacctctgcctcctaggttcaagtgattttcctgcttcagctccctgaagtagctgggattacaggcacgcacaaccacgcctggctgatttttgtatttttagtagaaactggatttcaccatgttggccaggctggtctctatctcctgacctcaggtgatccactcatctcggactcccaaagtgctgggattacaggcttgagccactgcgcccggccagggttcctatttttaagcaatataaagtgactttggttattttaaatagaaaggctgttagctactggaaggtgattgtttagctcacaaaattaacagcaattctggaaaaatagggtaagaatatgagtaggaaaaagaggctgtggtaggggaccaacagccaaggtaatgttcaaagctatctggtaggacctgctgccacaccacccatctcctgggtactgaacacctgacccaccccctgggtactgccatgggactctagacccactgatgccactatagatgatttcctgattgtgtctgtgtttttgtctcacatcctcatgattaagagttccagacatctagccacatgttaaaaccttagggttcaaggtgaggtgaggaagaatgaatacctccttcagctgttgtagtgggaggcaaagccttgtccctgatcaagagccacacaataggaggtactcagaaaatcagaaaagagttttgagactgtgtgtataataaacaataaatgcggccaggcatggtggctcacgcctgtaatcctaggactttgggaggccaaggtgggcagatcacttgaggccaggagttcgagaccagcctggccaacacagtgaaaccccatctctactaaaaatagaaaaaaaattagccaggcatggtggtgcatccctgtaatcccagctactcaggaggctgaggcatgagaatcacttgaacttgggaggtggaggttgcagtgatagtgtcactgcactccagcctgggcaacagagtgagactgtctcaaaacaaacaaacaaacaaacaataaatgccattatatacattatgggaattagatcctccgggaagctgagatttagacggagttaggggtccatcattttattggagggaggagggtaatgcatgtgaaagaccaaaaaggaaggaagcagatgacactggtagcagaaaagtcttcagaacaggatgcagatccaacacttgtgaaagaaaagaaggaaggaaggaggattggacagagacaggccaagaccaccaggcagagataacagacccataatccagagaaaaatgctgttggggatggtttatgttggacagatagggtcatgccctggatcccagagtccttaattactatttggggcttccttggaaaagcatgggttccgctccacactgaggtgggtcctaatggtgctgcaactggagactctcagctcactgcccttattgaagctgattggaaagttctccatgaatgaagattcaagtagcacatccctatgcccaccacagacaccaacatacaaacccacatcattaaagccttggcacccccttctataaatgcagcatctcagagctacaaacacacctcgcaagtacacagtacaatgggcatcaaacatttttagctgtgaaacgttttttaaaatgatcttacttgcaaatagaatacataaagcaggccgggcgcgatggctcacgcctgtaatcccagggcgttgggaggctgaggcgggtggatcacctgaggtcaggagtccgtgaccagcctggctaacatgatgaaaccctgtctctaccaagaaaatacaaaaattagccgggcatggtggcacgtgcctgtagtcccagctactagggaggccgaggcagcagaattgcttgaacctgtgaggcagaggttgcagtgagctgagatcacgccactgcactccagtctggtgatagagcaagactgtgtcttaaggaaaaaaaaaaaaagaataagcaggagagagaattgttgatctctctttaggtaaagcacagaagagctataggtcctcaaaatagccttcatttctatttatgacgtgagcctattagaaagttcctagaggctggcgcggtggctcacgcctgtattcccagcactctgggaagccgaggtgggcggatcacgaggtcaagagattgagaccaatctggccaacatggtgaaagcccgtctccactaaaaatactaaaattagctggatgtggtggcacgtgcctgtagtcccagctactcgtgtggctgaggcaggagagtcgcttgaactcgggaggtggaggtggcagtgagctgagatcaaaccactgcattccagcctggcgacagagtgagattctgttaaaaaaaaaaaagttcctagaaattctgagaatctaagacattgtagttattcaacacacatcgggtccttccaaggggcccacggaaggacctaatgacataatggtgaccaggaaaagctcagtgactcaccacatagggctcacagcccagcagggaagagtgctccatcctttacagtgacggcccagcatagcccagcatagctctgatgaaggaagcacggagtagaatgtggaggactgtgatggaggaagcccaggtggattaggtaacaccaggaagtatgaggcaggttagagggaatccgtactcctgctatcccctggaagtaattcatttaattagagtaaacatttctcagaaactaggtgaatcaattttcttcctagaactaatcaagacctacaagtcagagaggacattttctttactgtgaggtttttttctttatatttgtttcttttctttttgaaaaagcctttattgatataacttacagatcataaagtgtacaattaagtgggtttgggtgtattaatcaatactgcaaccatcaccatggtcaattttagaacattttcatcacctctacaagaaacctcataccttctaggtcttaccccttttcccccacagtcaattccctgccctgagcaaccacgaatctacttttctttgtagattcactttttttttttttgagatggagcctcgctctgttgcctaggctggagcgcaatggcacaatctctgctcactgcaacctctgcctcccaggttcaagagattctcctgcctcagcttcctgagtagcttggattacaggcacccaccacgacgccaggctaatttttgtatttttagtaaagatggggtttcaccatgttggccaggctggttttgaactcctgacctcaaatgatcgtccggccttggcctcccaaactgctgggattacaggcatgagccaccatgcctggcctagattctctattcctgacttgcatataaattaagtcatatattatgtggtcttttctgactgcgttctttcactaatacttttttaaaggttcatgctagttgtagcatgaagttctgcttcattcctctttgtggctgaacgaaattgcattgtatggatatatcaccttttatttatcagtttatccagggatggatttattagcttcctagggctgcctaggaacctaggtacatataacaaagtaccacaaactgagtggcttaaaaaaacaacagaaatgggctgggcacagcagctcacacctgtaatcccagcactttgggaggctgaggggggcggatcacaaggtcaggagatcaagaccatcctggctaacacagtgaaaccccgtctctactaaaaatacaaaaaattagccaggcgtggtggtgggcgcctgtagacccagctactcaggaggctgaggcaggagagaatgggaggcaaggcggagcttgcagtgagccgagatcctcaactgcactccagcctggatgacagagcgagactccgtctcaaaaaaaaaaaaaagaaagaaagaaagaaagaaagaaaaaatcccatattctccacttattcatccctcctccctaaactcctggcaactactgatctttgtactgtcttcacagtctcactttttccagaatattatatagttggaatcacacagtatgaagccttttcaggctggcttcttttactgagccatatacatttaaggttcctcccagtcttttcatagattgatagctcatttctttttattgctaaataatattgtatggatgtaccacagtttgtttcctcattcacctgttaaaggacatcttggttgcttccaagtcttgcaattatgaataaagctgctgtaaacatttctgtgtaagattttgtgtggatataagtttttgtgtgtggatataaagctcatttgggttaataccaaagagcctgatggctgtatcacatggtaagaatctgtttaactttgcaagaaactgcaaatctgtcttccaaattagctgcgccattttgcattctcaccatcaatgaatgacagttcctgttggaccacctccttgccagcatttggtgatcagttttggattttagccattctaataggtgggtagtggtatatcattattgttttaatttgaaatttttagtgacatatgatgtggagcatctttccgtatgcttatttgctatgtgtatattttctttggtgaggtgtctgttcagatcttttgcccacttttcattgggttgtttgctttctattgttgagttttaacagttctttgtgtattttgaatgtaagtcctttatcaggtatgtgccctgtaaatatgttctctccgtctgtagcttgtattgtcgttctcttgacaattcttttgcagagcaatttgtaattttaatgatgtagaatttatcaattgtttctttcatggattgtgcttttggtgttgtgtctaagaagtcaccagcaaacacaaggtcatctagattttctcctatgttatcttctagaagttttatactcattttttatttaggtctacaataaacttggagttaattttcgtgaaagctgtaagggagcttctaagggggacacacactaacttatttgagagagggcaggtaattgtgaaactcttagctgggtcttacaacagaccctagatccatcaagagaacccaaccttcagaaacccatagtggaatgtttttcatgcatacatggggagagtatgcagtcatatgctcacatgcacaactgtacatgatcacacacatgcatatggtatgtcctgatccagagttctcccagcattctctcagaatgtttctctctgtcaatttcttcattaagcggtctcattgtgtccctgaactgactctcaatggacgacagtggccttacctggtagggggtgcaggctacaccctggtgcacaaagtgtgcttgagtaggtgagagtgggcaagtgtgcagtgaagccaggacaaccgccggccaggtctctggagaaaaccccaggacagggctgttcaggctgtgtgatgctatactaagctgtttgacttgaggaaggggtgctttttaagaatctgcccagagggttgtgttcaaagatttgctgggcacttatattctgtgacacctcagctacagacaactttctgagcctcagctttgtcatgtgtaaaatgggcatgaatgctgttcccctttgcagaggtttgtgggcattaagtgaggtgagcatgcaacggtttttgaacagagctgacacggaggtacttgttcaagaaatgagatgctattattactactctttgtagcatagtttaaggtttcccttcctctcatcccagctctgaaggacatcgtcaaggtgaactgagccccttctgtttcttctcttccccctaaccacctcgccccttcctttccccctgtcctgcccccattcttagccccgcccctcccgcaggcccgctcctggccccgcccttcctctgatcccgcccaccacgccggcaccagcacagccctccctcagcaaggcaagtagcacttggtgtagtttcgtgggattgtgacaaagcccacgtgtttgggggacacaacaatgtccttaggcgactgccgcgatttgaagcggaagttctgcatgatggtggtgaggtagagaaagagctccattctggccaggccttctctgaaacagttccgccttcctgaggaggagaggcgggaggggtggaggtgaagcccactcttagtgcagccttgccccgctacagacctccagctgcggctctcccagggaggaggggtggaatattatggcctgagagactttcagaggaggctctgatcctccctgagcctcagtttccttgagtgtacaaaagatgtacaaaagatggggtgatcgatgccaggtgtcacaatgggaggtttagatgccccttcccccagataacactcgcaaatatgactgctgtgccgtcatctcctttttagggatctgaagaatctgctgtgtgaccctagggaaataaatctctgattctctctgggctttggttttccccgcctctgaaaggggtatgatgtttcctttccttttgcctgggcacaggtactgggtgcttggtagttaagggagtatcagctggtggctcaacggtagattctaacaggaacttccaagctggggaaatactaggctacacggcagagaggggagctgggtaagggaggcccctgctggtgtgagtagtagcctggcagcaaacagtggtctcttactgatggagaagggcacaaaagcatcacgcttcttaaactgccccttctcacccaggaagtgctggggattgaagtcccgggggttggagaagaacctgaggtctctcagcacggagcccagcatagggaacacttctatgccctgggagggaggaggaaggtgtatgtgatgaggcgggttgggggattgttgagagtacacaggggctggagggggaactagggtgccccaggtgaggggaagtggcaggcatgggaattggggacctctgagggaggagccttgggggatagaagtttcacgtctctgagacaggaagtttgggagacatggggttcatgtcctcttaggcagggtgttcagggaacatgaaatttatgtccttaaagcaaaaaggcaaggggaaaggaaaaggagactcatgtcccttgggacagggagtttgtggacatggagttcattcctctccatgtggcaaaaattctgggggagatacaggattcaggagtctctgagagggaagatggaagggatgtggtggttcaaaaaatctttcattgagagagtgagacaggggctagaaagcttctcatggagatggggtgctgaggtcacagagagtgtgttggaagtcctaggctggtggggggacatgcagcaccttggagaggaagaaatcccgaaacttggtgtccttcttgaccctgcgggacacacccatggggagcaagtctccaaatctttggatctcatggatcactgcctctgtgtagagcgtcttggcccggtcctcaaacttgggctgctggttcttgccgatcactctgtcaatctcatggacctttgctgggggaggaaggggaatgcgtttaggtatctaggggtctcagagcagggatgatagcctgaataggtaaaacggggtggatgacttggctccgtgtatgacacggaggtagaccattcataacagatgtcagcaattagcattgttggcgcaggatcacgttaaccaggtcgtgccagaatcacaggggaggcacagggaggaattcaggggatgatccagaggagcgggcagcgggcactcagtgggcttgggacaggagtgactgaccaatcattgcagacattttcaatatttaaatagctaatgagactcagctgatgcctatcagctgaatattgccctgtctctggacagcaaggcacgtctcagggtcctgggatctgggacaggtggggactttgcaccaggctcaggggagttttgagggtctgggaccctccacttcccttcccctccagccttaccctccacctctgggtgcttcatgagcagcaggaagccgtagtgcagggtggtgctgacggtctcagtgcccccaacgaagaggttcaacgtggtcagcaccaggttcttcaagtagaactctgtgttggggttcttctcctcctgcagggagagggggctttaggccaacctcactcctcttgccctcaaggcatgccgccacatctggctaatgttttaaaaaatttgttgtaaagattatatctcgccatgttgccctggctggtctcaaactcctgggctcaagcaatcttccttttccagccccctaaagtgctgggattttggtgggagccactgcaaacagcccagattattatttatttatttttatttatttattttttttttgagatggagtcttgctatgtaacccaggctgtagtatagtggcatgatcttggctcactatagcctccacctccccagttcaagaagttctcctgcctcagcctcacgagtagctgggattacaggcatgcaccaccatgcccagctaattttggcatttttagtagagatggggtttcaccttgttggccaggtcggtcttgaacgtcctcctcagcctccaaaagtggtgggattacaggcgtgagccaccgcgcctggctgaggcccagattaaaatgtttaaaaaagtactctttatgcagattcaccttaacattttaacccattcccaatatgacttgttctattctatcaatcaatcatctatctatcttactctgttttatgctactataacaaaatactacagactaggtaacatatttatttatttttttgagatggagttgtgctcttgttgcccagactggagtgcaaatggcatgatcttggttcactgcaacctctgcctcctgggttcaagtgattctcctgcctcagccttcagagtagctgggattacaggcgcctaccaccactcctggctaatttttgtatttttagtagagacagggtttcaccatgttggtgaggctggtcttgaacacctgaccttgagtaatctgcccacctcagcctcccaaagtgctgggattacagacgtgagcagtagcacccagtctacttataaagaatacaaatttatttcccacagttctggagactgggagtccaagatcaaggagctggtaggttcggtgcctggtgaggatcaggtttctgctttcaagatggctccgtgctgttggatcctccaaggggaggatcactgcgttctcacatggtggaaggtggaagaccaagagaggtgaactccatccatcaagcccttttgtaggggtacctaatcccattcatgatgatggaaccctcatgacccaatcacctgtcataggccacacctcccaatactgttgcattggggattacattccaacatggataaaaaacattcaaaccatagcaatatctatttagtactttttctgaaccacttagggtaaattacatacaacataggttttacctctcaatactttggagagtatctcctaaaaatggggacattttctgatataactgcagttacatttatcagctatagtaaatttaacgttgatgcaatactttcatccctgaggtttatattccaactgttggtttgagaagtaatttgacaactttgaaacgaaatggtagtttctttgttgcctgagtgatgccacacttaagactcactcatggttcagcgtggtggcttattcctgtaatcccagcactttgggaggctgaggcaagaggattggttgaggtcaggagtttgagaccagcccatgcaacacattgagaccctgtcattaccaaaaacaaaaacaaaaaagaaaacaaacaaacaaaatacacaaagaaaaaaaaagactcacatctaagtttccagaggcatctcaacagttaatggcaagggccctggatccagggagctgggctttgatcctggctctgaatgctatcagaaaagtgacgttgattaagttatgtgatctcttcatgccttggtttccccagtggtaaatggggataattttagagatacgtggtgaaaacatttataggtgaattgatgcaaggtctggcattttcttcaaaataatcccaatttgaggaggaggttccaagatggccaaacaggaacagctccagtctgcagctcccagcgtgagtgatgcagaagatgggtgatttctgcatttccaactgaggtactgggttcatctcactggcacttgtcagacagtgggtgcagcccatggagcagggcagggcagcgcctcacccgggaagtgcaaggggtcgggaaattccctttcctagcaaagggaagccgtgacagatggtacctggaaaatcaggacactcccacactaatactgtgcctttccaatggccttagcaaacggcaccccaggagattatatcccacgcctggcttggagggtcccacccccatggagcctcactcacaggtagcacagcagtctgagatcgaactgcaaggtggcagcgaggctgggggagaggcatccgccattgctgaggcttgagtaggtaaacaaagtggccaggaagctcaaactgcatggagcccaccgcaggtcaaggaggcctgcctgcctctatggaatccacctgggggcagggcatagctgaaaaaaaggcagcagaaacttctgcagacttaaatgtccctgtctgacagctttgaagagagtagtgcttctcccagcatggagtttgagatctgagaacagatagactgcctcctcaagtgggtccctgacccttgagtagcctaaatgggagacacctcccagtaggggcccactgacacctcatacagccaggtgcccctctgagatgaagctttcagaagaaggatcagacagcaaaatttgccgttctgcaatatttgctgttctgcagcctccgctggtgatatccaggcaaacagagtctggagtggacctccagcaaactccaacatgcctgcagctgaaggtcctgactgttagaaggaaaactaacaaacagaaaggatatccacaccaaaaccccatttgtacgtcaccatcatgaaagaccaaaagtagataaaaccacaaacatggggagaaaccagagcagaaaagcggaacactgtaaaaatgaaagcgcctcttctcatccaaaggaatgcagctcctcaccagcaacagaacaaagctggacagagaatgactttgatgagatgagagaaggaggcttcagacaatcggtaataacaaacttctctgagctaaaggaggatgtttgaacccatcacaaagaagctaaaaaccttgaaagaagattagatgaatggctaactagaatgaacagtgtaaagaagaccttaaatgacttgatggagctgaaaaccatggcatgagaactacgtgatgcatacacaagcttcagtaactgatttgatcaagtggaagaaagggtatcagtgattaagatcaaatgaatgaaatgaagcgagaagagaagtttagagaaaaaagagtgaaaagaaatgaacaaagcctccaagaaatatgggattatgtgaaaagaccaaatctacatctgattggtgtaattgaaagtgacgcggacaatggaaacaagctggaaaacactcttcaggatattatccaggagaacttccccaacctagcaaggcaggccaacattcaaattcaggaaatacagagaatgccacaaagatactcctcgagaagagcaaccccaagacacataattgtcagattcaccaaggttgaaatgaaggaaaaaattctaagggcagctatagagaaaggtcaggttacccacaaagggaaaccgatcagactaacagcagatctcttggcagaaactctacaagccagaagagaatgggggccaatattcaacattctgaaagcaaagaattttcaacccagaatttcatatccagccaaactaagcttcataagtgaaggagaaataaaaccatttacagacaaacaaatgttgagagattttgtcaccaccaggcctgcttacaagagctcctgaaggaagcactaaacatggaaaggaacaactggtaccagccactgcaaaaacatgctaaattgtaaagaccatcaatgctaggaagaaacagcatcaactaatgagcaaagtaaccatctaatgtcataatgacaggatcaaattcacacataacaatattaaccttaaatgtaaaagggctaaatgctccaattaaaagacacagactggcaaattggataaagagtcaagacccatcagtgtgctgtattcaggagacccatctcacgtgcatagacacgtatggctcaaaataaagggatagagaaagatctaccaagcaaatggaaaatgaaaaaaaaaaaagcaggggttgcaatcctagtctttgataaaacagactttaaaccaacaaagatgaaaagagacaaaggaggccattacataggtaaagggatcaattcaacaagaagagctaactatcctaaatatatatgtacccaatacaggagcacccagattcataaagcaagtccttagatacctacaaagagacttagactactacacaataataatggaagactttaacactccactgtcagtattagacagttcaatgagacagaaagttaacaaggatatccaggaattgaactcagctctgcacaaagccgacctaaaagacatctacagaactctccaccccaaatcaacagaatatacattcttctcagcaccacatcgcacttattccaatattgaccacataattggaagtaaagcactcctcagcaaatgtaaaagaacagaaatcacaacaaactgtctctcagaccacagtgcaatcaaactagaactcaggattaagaaactcactcaaaaccactcaactacatggaaactgaacaacctgctcctgaatgactactgggtacataacaaaatgaaggcagaaataaagatgttctttgaaaccaatgagaacaaagacacaacataccagtgtgtctgggacacatttaaagcagtgtgtggagggaaatttgttgcactaaatgcccacaagagaaagcaggaaagatctaaaactgacaccctaacatcacaattaaaagtaccagaggagcaagagcaaacacattcaaaagctagcagaaggcaagaaataactaagatcagagcagaactgaaggagatagagacacaaaaaacccttcaaaaaatcaatgaatacaggaggtgggtttctgaaaagatcaacaaaattgatagactagcaagactaataaagaagaaaagagaagaatcaaatagacgcaataaaaaatgataaaggggatatcaccaccaatcccacagaaatacaaactaccaccagagaatactataaactcctctatgcaaatagacttgaaaatctagaagaaatggataaattcctggacacatacaccctcccaagactaaaccaggaggaagttgaatccctgaatagaccaataacaggctctgaaattgaggcaataattaattgcctaccaaccaaaaaagtccaggaccagagagattcacagctgaattctaacagaggtacaaggaggagctggtaacattccttctgaaactattccaatcaatagaaaaagagggaatcctccctaactcattttatgaggccagcatcatcctgataccaaagtctggcagagacagaacaaaaaaagagacttttaggccaatatgcctgatgaacattgatgcaaaaatcctcaataaaatactggcaaaccgaatccagcagcacatcaaaaagcttatccaccacgatcaagtgggcttcatccctgggatgcaaggtgggttcaacatacacaaatcaataaatgtaatccagcatataaacagaaccaaagacaaaaaccacatgattatctcaatagatgcagaaaacgcctttgacaaaattcaacagccctttatgctaaaactctcaataaattaggtattgacgggatgtatctcaaaataataagagctatttatgacaaccccacagccaatatcataccgaatgggcaaaaactggaagcattccttttgaaaactggcacaagacagggatgccctctctcaccactcctattcaacatagtgttggaagttctggccagggcaatcaggcaggagaaagaaataaagggtattcaattaggaaaagaagtcaaattgtccctgtttgcagatgacatgattgtgttagaaaaccccactgtctcagccccaaatctccttaagctgataagcaacttcagcaaagtctcaggatacaaaatcaatgtgcaaaaatcacaagcattcttatacaacaataagagacaaacagagagccaaatcatgagtgaactcccattcacaattgcttcaaagagaataaaatacctaggaatccaacttacaagggatgtgaaggacctcttcaaggagaactacaaaccactgctcaactaaataaaaaagacacaaacaaatggaagaacattccatgctcatggattgcagtaatcaatatcatgcaaatggccatactgcccaaggtaatttatagattcagtgccatccccatcaagctaccaatgactttcttcacagaattggaaacaactactttaaatttcatatggaatcaaaaaagagcccacattgccaagtcaatcctaagccaaaagaacaaagctggaggcatcatgctacctgacttcaaactatacttcaaggctatagtaaccaaaacagcatggtagtggtaccaacacagagatatagaccaacagaacaggacagagccgtcagaaataataccacacatctacaaccgtatgatctttgacaaacctgacaaaaacaaacaatggggaaaggattccctatttaataagtggtgctgggaaaactggctagccatatgtagaaagctgaaactggatcgcttccttacatcttatacaaaaattaattcaagatggattaaagacttaaatgttagacctaaaaccataaaaaccctagaagaaaacctaggcaataccattcaggacataggcatgggcaaggacttcatgtctaaaacaccacaagcaatggcaacaaaaggcaaaatggacaaatgggctccaattaaattaaagagcttctgcacagcaagagaaactaccatcagagtgaataggcaacctacagaatgggagaaaatttttgcaatctactcatctgaccaagggctaatattcagaacctacaaagaactcaaacaaaattacaagagaaaaacaaacaacccagtcgaaaagtgggtgaagttccccttcctgtgtccatgtgttctcattgttcaattcccgcctatgagcgagaacatgcagtgtttggttttttgtccttgcgatagtttgctgagaatgatggtttccagcttcatccctgtccctacaaaggacatgaactcatcatgtggggtggggggaggggggagggatagcattaggagatatacctaatgttaaatgatgagttgatgggtgcagcacaccaacatgtcatatgtatacatatgtaacaaacctgcacgttgtgcacatgtaccctaaaatttaaagtataataaaaaaagtgggtgaagatatgaacagatacttctgaaaataagacatttatgcagccaacagacacatgaaaaaatgctcatcatcactggccatcagagaaacacaaattgaaaccacaatgagataccatctcacaccagttagaatggtgatcattaaaaagtcaggaaacaacaggtgctggagaggatgtggagaaataggaacacttttacactgttggtgggactgtaaactcgttcaaccattgtggaagacagtgtggtgattcctcagggatctagaacgagaaataccatttgacccagccatcccattactgggtatatacccaaaggattataaatcatgctgctataaagacacatgcacacctatgtttattgtggcactattcacaatagcaaagacttggaaccaacccaaatgtccatcaatgatagactggattaagaaaatatggcacatatacaccatggggagggatagcattaggagatatacctaatgtaaatgacgagttaatgggtgcagcacaccaacatggcgcatgtatacatatgtaacaaacctgcacgttgtgcacatgtaccctagaacttaaagtatatatataagaagaaatagagaaagtacatgctttctctatacacttacatgctgtatgtaagtgtcatacagaggtatgctctgtaagacacttacctcagcatatacagttaaaccctttttctatgtggttattgagaatttgactagtggtgttaattatgggtagccaccggtactgatcagtactttttgtttattcctatttttccaggaaccatttgttttacacattgttctctgtattactcatatttacccagagagaaaaatatatcactataatttgtaaaattcatatgtttaatggaaggagcaaaactgttctccacttattacaattatttttgaaacataaaaaaagttgtgaagatttcatcttaatatggacatttatctgttctcaaataatacttttataatttcttatgcctgtctttagtatcttaatcctgttatcttcagaagctaaggatgtgtgtcacctcaggacctctgtgataattgtgttaactgtacaaattgattgtaaaacatgtatgtttgaacaatatgaaatcagtgcaccttgaaaaagaacagaataatagtgatttttatggaacaagggaagacaaacataacgtctgactgcctgtggggtcaggcaaaaagagccatatttttcttctttctttcttcttgcagagggcctataaatggacgtgcaagtaggaaacatattgctaaattcttttcctagcaaagaatattaatattaataccctggtaaaagtatgcgttcctggggggaggtctataaatggctgctctgggaatgtctgccttgtacagttgagataaggaccgagataaaccttggtctcctgcagaaccctcatgcttactagggttgggaaaacttaaccctggtaaatttgtggtcagactggttgtctgctcttgaaccctgttttctgttatttaagatgtttatcaagacaatatgtgcaccgctgagcatagacgcttatcagtggttctgcttttgccctttgccttatgatctttgttggacccttatcagtggttctgcttttgccttttgtcctgtgatctttgttggacccttatcagtggttctgctttttgctctttgaagcatgtgatctttgtacctactctctgttcttacaccccctccccttttgaaacccttaataaaagcttgctggtctgagacgcaggtgagcatcatggtcctaccaatatgtgatgtcacccctggtggcccagatgtaaaattcctctctttgtactgtctctctttatttctcagctggccaacacttatggaaaatagaaagaacctatgttgaaatattgagggtgggttctcccaataataatacagacatgaaaaacatttgatggaaatccaacatccattcctgattaaaaattatcagcaagctagaaataaacagaatttcttaccctgactaaaggcatctacaaaaatatctgcagccaacatcatacttaaaggtgaaagacttgatgctttccctctaagattgggagcaagtaaagaatggcggttcttaccactctgattcaaaatcgcgctggaggttctatctattattccactctctaggtccatgtgtacacattgtgtagcacccacttacgaatgagaacatgtgatactttctgtgcctggcttatttcacttaagataatcacctccagttgtatccatgtggctataaaagacaagactttattcctttttatggctaaatagtattcaatggtgtatatataccacattttatttaaccattcatctgttgattccctatctttgctattgtaaataggatttggaccacatttcaagtacttaattagtggccacatgcagcaagttactaccatattggacaatgtagcctcaacccactatatgaccttgggtaagacttgcaaactgtcactgcttcaatctctccatctataaaatggggatggcaacaatacctccctaaaagggtaaagactgagtcactgtgtgtaaagcacttcatgcctccccactggtgcttcaccctggggctggaatgagcacccaatcttagcgtcagatgacacagcacagcaggaccctggtccttgggtcagaaaagtccatgctggcacctctccagtgtcaggaaagtacagcttccacctcataaaaatcaggattgtttatcttatcctcctgggtcaaagtaacttctgggctcagggtaaacactgagtcactgtgtgtaaagcacttcacgcctccccactggtgcttcaccctggggctggaatgaggacccgatcttagtgtcagatgacacagcacagcaagacccaggtcgttgggtcagaaaagtccatgctgcctcctctccccggtcaggaaagtacagcttccacctcttaaaagtcaggattgtttgcttctcctgggtcaaagtaacttctgggctcagggtaaacactgagtcactgtgtgtaaagcacttcacgcctccccatcggtgcttcacgctggggctggaatgaggactcaatcttagtgtcagatgacacagcacagcaagacccaggtccttgggttggacaggtctgtgctggcacctctccagggtcaggaaagcacagcttccacctcttaaaaatcaggactgtttgtcttctcctgctgggtcaaagtaacttcagggtcaggatcctggatccagcaaagagtttggttaacattgcaagaaagatgttgcctcatggtcaaaagtcaggcctaggatgagacaggcagacacggacacattcacatccaaattgtgcaaatatggactgaccctgtcagaggctgtgtgggtgcaggctcacagtgaagatagagacatatgggagtccagtagacatcaatcaaactggacccagtttccacacacatggagctcaagagtctccagggggaaaacagagacataaagttagagagagatagagccagagaaatttcctgcaccaggaagatagttgggaagaaccccctcagcgctagttagagtgatcagaaaccaaggggacccgatcactgcacctgccagtctcagtttctgtctccctccaactgaccacctcttcctctgagactcactggttctgcatttcttgcccctccttctgtttctcccatcacttccacctatggctgtcacagaaggactgataaaggaggggacactggagatagaccctgagcattgaaggcggccagcccccccacacctgtgggtatttctcatcaggttggacgagagactgagaaaagaaataagacacagagacaaagtatagagaaagaacagtgggcccaggggactagcgctcagcatacggaggacctgcactgacgccggcctctgagttcactcagtatttattgatcattatttttactatcttagtgaggggagtgtagcagggcaacaggttgggagaaggtcagcacagaaacatgtgagcaaaggaatctgtatcatgaataagttcaaggaaacgtactgtgcccagatgtgcacacaggctagatttatgtttctctttacccaaacatcttagtttagcaaagagtaacagagcagtattgctgccagcatatctcgcttccagccaccgggtggttttctcttatctcaatagaatgaatgggaatggtcagctttacaccaagacattgcattcccagggatgagcaggagacagaagccttcctcttatcccaactgcaaagaggcctccctctttcactactcctcctcagcacagaccctttatgggtattgggctgggggacagtcaggtctttcccttcccatgaggccatatctcaggctgtctcagtggggggaaaccttggacaatacccaggctttcttgggcagaggtccctgtggctttccgcagtgcattctgtccctggttaatcgagaatggagaatggtgatgacttttaccaggcatactgcaaacatattgttaacaaggcacatcccacacattcctaaatccattaaaccttgattcaatacagcacatgtttctgtgagcacagggttggggctaaagttacagcttaacgcatctcaaagcagaaacaatttttcttagtacagatcaaaatggagtttcttatatcttccttttctacatagacacagtaacaatctgatctctctttcttttccccacaagcgtctgcaggcttccaaagagaggggctaggagatgcaccaacacagaagcacaaatacaccagcacacacagatacacacaattggttcacatattgctaggttacagtttgctatgcgacaaaggcagtggaccagatttgattgaattgaacaattccttcttttcatcagcttctcaattttttttttgagacagagtattgctctgtcacccaggctagtgtgcagtggcataatcctggctcactgcagcctccacctcccaggttcaagtgactctcttgcctcagcctcccgagtagctggaattaaaggtgcccaccaccacgcccggctaatttttgtatttttagtagagacggggttttgccatgttggccaggctggtctcgaactcctaacctcaagtgatctgcccaccttagcttcccaaagtgctgggattacaggtgtgagccactgcacccagccagcctcccaattttgaacacacactaccaccacctccacaacacacaaatgtaaatgcactttcatatatgaaactgtataaatacaaggaagctccacacgtgcaaggatatacacataagcacccccagattcaaccacagaaacacacgcctgcacatttgcataaatacaaacaccactttacatataaaaatcatataagcacatacacggatgcaagcaagcatggagaaatgcacggaagcataaacaaacagacaaagctaagtaaaaaagtgtgcatgctcacctgtgcttacaaaaatacacatactcatacacaaacacccacacgttcacatgcttaggtggactttgatatctctaccactgtatccctgccaacatctagagagtggataagggataggcattaggtcgctgggttgcctaagcaggaagtctgggttccctaacacctttttctaagctaatgctccttgacgataatgagaaaggaggcggggaatggatgaagtttcataactgagtgaagaggcaggttcaggataaaaggcccagttagaggctgcagtggggtgcagggcagtcagactggaaccatggagctcagcgtcctcctcttccttgcactcctcacaggcctcttgctactcctggttcagcgtcaccctaactcccatggcaccctcccaccagggccccgccctctgccccttttggggaaccttctgcagatggacagaagaggcctactcaaatcctttctgagggtaagacacagacgaatggggtctgagggtgggctgcttcttgtctctgtacttggggatccttcaccaaacagaatgaggcagacttccagagtcaggggtggcacggggatggttggtgagtacagagcatagtgaagcatgatgggtggtagtattaggagaaaaacatcagtcaaattaaatttagcagagtttatttgagcaaagaagtgactcatgaatcggacaactccctaaaccaggagagacaccacacggcagtatgggcaagcagtattcacaggcagaaaaaggaggtgacatacagaaacagcctggctggccacagatcacagcttgccttacttggtcacagtctgaggagctagcagcctgtggtggactgaaagcccagctgctctgattagccaacatttggctacttgtcgcaagaatctattcatctgggccgggtgcagtggctcacgcctgtaatcccagcactttgggaggccaaggcggtggatcacctgaggtcgggagtttgagaccagcctcgccatcatggggaaactgtgtctctattaaaaatacaaaaattagctgggcatggtggtgtgtgcctgtaatcccagctacccaggaggctgaggcaggagaatcacttgaatccaggaggcgaaggttgcagtgagcagagatggtgccactgcactccagcctgggcgacagagcaagagtccatctcaaaaaaataaaaataaaaaaaagaagaatatactccctcccaagttaggttgcagttcactctatgcagagagaactttatgtcaaatttaatttaattaaacaattctccccttttgatgagcctcaaaattttgagattgaccaaaaccttgggcatcaacattacttctgtcaccatcataatggacttgtttgctctcagtatggaattcacaatggacaatgtcaaagtagttgagtgattctttgttttcttcatgtttttgttattcatactgtaatgaagccattggatgtacaaagaatggctgcatatgagcatttaagactctctctcttttttttttttttttgagacagggtctcactctgtcacccaggctggagtgctgtggcatgatcatgtctcactgcagcctttacctcccaaggctcaggtgatcctccgcctcagccccccgagtagctggaactataggtgcatgccaccacgcccagctactttttgtattttttgtagagacagggttttaccatgttgcccagactggtctcaaactcctgggctcaagcaatccacctgcctcggcctcccaaagtgctagccattgcacaggtgtgagccattgcacccggccaagactctcaagaaaatacaacacatcagggagactgttatgatggctctcaggagggtaatacaaagaaaatgaagtctgtaccttaccgggagtctccatgaaccaaactgatcaaaatcgaataattcaaagctcaggcaataaagatagttcaatagtattagagtccaattggtcatatactttgttcagagcacaatggtgattaaggactagagcttgctataaaataacttgatttacagaggcatttgtttttgtagttcacctggtaacacatgtcatagtaccttggagacccactagaagaaacattaagagtagaaaaccttgtgataggcttgctgtattagtccattctcacagttataaagaaatacttgacactgggtaatttataaggaaaagggatgtaactgactcacagttccacatggctggggaggccccaggaaacttacaatcatggtagaagttgagggagaaggaggaaacttacattcatggtggaaggtgaaggagaagcaagtaccttcttcacaaggtggcaggagagagagagagagagagagccaagggggaagagcctcttataaaaccatcagatcttgtgagaactcactcactatcacaagaacagcatgggggaaactgcccccaggatccaattacctcctagcaggttcttccctccacatctgaggattacaattcaagatgagatttgggtgaggacacagaaccaaaccatatcacttgccatcaccattcaggatgcttgcaaatcaactgttacctgcacccgtaaatacatatcttctttttcccctgagaattttccttagtgtatttggtggcagtgtctagagaaacagcattgtcagccacattttaaattaagttatatgtactagtaaattcacgggaaagataagaacaatatttggttttgttcagcaccatacacaagcctccaagatgggcaaagaggagatctaaaactgcatgatgttccattaagcgtttttgtttaatacaatgttctcatcctccttttggagagtggcttctacccatctgaactccttggaggttcaattggctacataatccaagatgtcccttaatgtataaattagcctcagattccatacaactgtcaccccaatatcaccaaaagtgagcacccagggactccattggaaccttttctctgcagaaaccaacttatcttcatcgactttgaggttgatagtaatttcagttattgactgttttggcttttaactgtgggaggtattagggaactctcaaggaaaaaatttggaaagcagcagtgagctaggccaaatagcaagttacgggccagtgaggagaaagaacagagtaagcgaacctcagcagacccaaggtaggcacttgtggggttggaaaagagggtcacctactggcattagagcagatatcagttaaatttgtttacacataagtctgcacagctcttgaacaaggtgggaagctcactttttttgtggtctctttctatcatgctgcaagggtgcatagccacatttagttggaaagagactttactgtatttacttatttatttatttaattattttttatagcgttggggtcttgctatgttgaccaggctggtctcgaactcctggcctcaagtgatcctcccatctaaatctcccaaagtgctgggattacaagcacgagccatcatgcctggccactttaccatatttaattcagtaacattacacatgcaattaaccgtacccacataggtagtccccaggtcctatgcgggatgcctggaagcacaatatgctttttgcagccatcattcagatacattttctatatttggtagtgattatattattagttagttaatagaatgttattacatactgttattgtattatattaactaataactagttattagttaatagtatgttattacatactgttattatattaaataactaataacataaccactatcaaatatttccagtgagtgcaaaaaagcaagtggcaattgatgtctagaatatcaagatatagctttccactcctcctttggggtttccgggtgattcccattgggaacacaaagaggcattggcgccagtgaaattatttcctgattttggggaactggctcacaaactcaacaattgcttgtcttttttcctagggtataagcctttgctaaagccattcacagattattgtactatggattttcttgtaaggaaagggaaagggttaggacagcaagaaacagggaagaaaggataaaagataatgctttcatgatggaagagaaatcttgatccacagtcttggaaaagctgtccacatataagatgccaactgcttcttgggaaaaactttcctggtcagctttgccttaaggtctcaacagacataaagttctaggagtctagaaggacccttttcaattgagagatgtggatccaagatcccagaccctgaagttttgctacagagaagaacttggcattgtcctttgcaatggagtacaaggacagtcttagaagaacctggtatggttacttccaatggagttcaaggacagtttctctggtgtcatttccaaagagcccaacctctaaattatagatagtgaaaggtctggttgtcatcaactgatgggtcatcaatgactccttttacctggtgaaaacatgccttggcataatgtattaaagccttgcattattgaatcatatcagagtttataagagtgggagatacatgagattctattattggggcataggacttcctattactattttacaagtgatctatctatgtctttccaataggagtggatctgattgccgtcaatcaataatacctttgaccaagggactccaatcaattcagcatgctttgcctaatgccttttgtttgtaatactgttgcgggacaatcaaagactggagagaccaaaaaaggttcaggagagtttattaaattaaggtgaccactggctcagccagaaatatgtccagagagtctgagccccgaacaaagggctttgcctgcttttaaacatcttaaggtgggaactacatgaggtgggaagcaagttacagaagggagaaacaaagcagttaattaacatttcttacatcttaagaaagacatgtgttgcaacctaaacttatcagtcttatgaccctgcagccatgcaggaactcactgggcctgtaataaactttaaggaatgtggagttgggaagaagagataaggtccattgtccacagagagaagaaaggttgttaatattctcttttaacttgaatgtaaggtgggggtcacactttgcagcaactttaaaaggattttaaaatttctattactactactattaggttatagttgatttcattaattccttcttcaataccttatttaagtattttaccacttctctagtgaagcaagtacctctaccactggagagttctccaggaatgccaagtaaggaaatacattttctaataacattttagctactgttatggcattgatctttgtgcataaaaaagctttaatacaaccagaaaacatgcaatgaaggtggcagttgaattaactccatcttcaagtgttcaaatgatctaccaagtcccagaaatatatcacctgtggtttttggtttttgttgtcttactagaattatggatttgataaatcaaatattagttataaaccattagaacagtcacctcatcaatattttttcataatttggatcattttatctcttctatgatgagtcgtggaatgcagagcttttagtaatggaaattttaagaactcaggaaggatcaggcggccatccagtgtctccatgagtgcatgcttcacactggaattacagcctcttaaatacaaattttaataccataagtaccaatttatgcttctccaattcaggtacataacactggtttattaaataggttatcataggtaatttgatggtgccattgcactccagcctgggtaacagattgagaccctgtctctgaattggaactgcacgggggcactgtccttggaggggtgagtgggcatgacgaggtgtctgggtatgagccacaggtgtagaatttcactcttctctgccatcctctgttacatcctgggtacctgcctgccactgaaagaatgaggtaaaagaggtggtggcacgaatcaaatagattttgctgtgccaatgagagagagcagactagcccatgtcagtgccaggagagtggaggagagagggagagcagcaaaggagtgtgggtagggagtgctcatcaacagtacacatagtgccctataccggtaactgccactggctcagtatttacctgggttatcactgcttaccatgcctgattttatgattaattatctacttatcattactaatcaatcaacccactttccaatgggagaattagaatactgacaataccttccccttccccctctcatgttgaccatactcctgaatcttaggcttgttatccttttgctattaatagagtttttttatttctgatcaatggtctttttactgatagagtaaatatgcatatatacagagtatatatgccaatggtactatgaattttaaaattatttgcttagacagaatatgtggacatacaaatgatgaatgtgataattgtcatacatatatatttatcttagacacttagtcaaaacatgtggtttttggttatgagttagacactgtcactttagctggaagatacaaagtaattgggtcatagactctcaaattatggaacacttagatttttcaggggaatgacatggagggagccaaggagtcttatgattaggtaaaatattgtttgggtggctcacgaccccactgggcaacactcaaagatgtggtggcttatgcctgtaatcccaacactttgggaggctgaggtgggaggattgcttgaagccaggagttcaaaaccagcctgggcaactgaacaagaccctgtctccacaaaaattttttaaaaatttagccaggcatggtggcctgtgcctgtagtcccagctacttgggagactgaagcaggaggatcacatgagccccgcagtttgaggttgcagtgagctatgatcacgtcactgcactccagcctgggcaacagagcaagaccctgtctcttaaaaaaaaaatcatctgcagtgtgaggagtgacaacatttaggaaagtgtgcataggtttaaattctggtcaaagacatcctacacaattcactgaaccttctctttaagggttttttctaaactctgcagacactatctggagaccaatcatgcctctattaacagaatttgctgctccttctagctcttggtatctcactgccccctttctttatgagagctggcatggtcattgaatatcccaatcctttacaaattctgaaacaagcaaaactgtcaatgaaattcatatttgcctaaaatgagttttcaaaaggatctttgtggctatcttgttagttcatagaaagtggaggcttgtcaggaacgatattgaatttttcatttaaattgttttagagacagggtctcagtctgttacccaggctggagtgcaatggcacagtgatagctcactgcaaccttgaactcctgggctcaggagattctcccgccttagcctccagagtagctgggactacaggtgtgaacgaccatgccccactatttttttttatttttgtagagacgtgttgggggagggtctcactatattgccttggctggtcttgaactcctggcctcaagcaatcctcctgcttcaacatcccaaagcattgggataagttttgaatagacatgtttgaccctctccccttcttcgttgcagcaaagatttccattttctcacagggagggcttggggtaaatagtttgttttgttgttgttgttgttgtttgaggatgtgggtgggtcatcttggttaatgtcagtgcaagaacagtgtccgttcctcattattggggttccttagccatccaggcaagcagtagctcccttgagaagacttcctgacccccaggtccccaccataggctctcatacaccagctgcccctccttactgagcctatgtccttgacaatgctgcatttacttgtgatcctgtggctgatctctccctcacacttccagacaaggaaggcctgcgaggactcaccacagagctgaacatagtgcctggtacacaataggcgtttagcaaatatgtgtatagaaacaaatgaaggagtcagtgagtgaaagctccaagcctgactcagcagaactgacagtcggccggggcctgcaaagtgctaccaggcccccagtagggggtcgcagatctaaggatccctccccaccaaatagagtcccatcacataggtgaaggtctcaagtgcctattgttttcttttcatcattttccatgtgtcacgagaatatcatgctatcatgtgaatcaatggacttagttttcccactagagtaatgtgtctgggaattacctgtgttgtcatggggattttctaggtgtcatttacaactacctgtggacaaggtgaggtgctaccctcatcttagaagtagggatggtggccgggcatggtgactcatgcctgtaatctcagcactttaggaggctgaggcaggcagatcaactgaggtcaggagttcgagaccagcctaactaacatggagaaaccctatctgtactaaaaaaacacaaaactagctggtgtggtggcacatgtctgtaatcccagccactcaggaggctgaggcaggagaattgcttgaacacaggaagcggaagttgccctgagccgagattgcaccattgcactccatcctggtcaacaagagtgaaattctgtctcaaaaaacaacaacaacacaacaacagcaataacaaaaaaacagtagggatggagatgctcagcctggggaaagcacttgtccagtggcacacaactaggaaaaggagaagctgagctccagcaggaggtctgtctccaaagccctcctagactaaagctgcttaacattttgtggattatgaaatcctctgagagtttgattaaagctgtggccccctcttttccaaataggcacatacatgtttgcataaagttgtgaggcttcacagactccctaaaactctttcataaaccttccaagggtcctctaggtattcatgaccgtctattatgattgcatctcttgggggtaggggaaagagggagggcatgagcaagtgtgtgtcaaggctgaggaaggtggcgctgttgcttctccatttcccaataagcttccagattccttttggagccagagggatgcgggctcgtgtctcagattcaattcttatgcgttgagtcacagttttctcttctgtcaattaagaccatgacaatgagaatgtgtgcccctaaggtggttgtgagaattaaatgggatattgcatgcagctagtatataataagtgctcattaaatggcaactaccttgatccactcattcatttattcatgaatccaataacaattcactgggcactttctatgtaccaggaaatattctatgaattgatgatgtggcatcttggacaagacatacgaggtaacactgtgcttatggacattccattggtggagacagataagcaaaaaataaacagataaggaaatgttaggtggacaagagctacgattaaactaaagcaggaggatatttcagaaagtgatggagaactacattagattgagtggttagggaaagactccgccttgctttgtttcttagcagggaccaggaaagattcaggtggaaggtgccagaaggaggcagggtggttgcaagaatcctgaagcaggaaaaatctcagggaacaacatggaggaatcagtgggaggagaagtcagagaggtgatggggccacatcatgtaggaccatgtcaaccacaggtggagacttcagatcttattctcagcaaagttggagtattggaggccttggtgagcacagggatattaattattttacattttagtggggttaccctggcttgtggggcagtgaaacagttgttaaggggtctaagaatgtaaggcaggagaccagtgaaggggctttgcagagatcaatgcagggcatttgtaagtaaacttaaacatttttctaatttttatgtcaagtttttattgaaattgaacatcactataaaaagtgcacagctcaatgaattttcacaaactgaacatactcatgtaattgacatgcaggccaagtagcaagagtcccccaaaacaccacaccccgtccttttctagtcactatccacctaccatcttgatcatgggttgattttgtctgtgtttgaacttttttttcttttttgtgagatggagtcttgctctgtcacccaggctggagtgcagcagcgtgatctcggctcactgcaacctccacttccccacgctcaaggaattctcttgtctcagcctcccgagtagctgggactacaggtgagggccaccacgccagactaatttttgtatttttagtagagacggggtttcaccatgttggtcaggctggactcaaactcctgacctcgtgatcagcccgtctcagcctcccaaagtgctgggattacaggtgtgagtcaccatgcccggccctgtgtttgaacttcatacacataaaattatgatgcatggactctcttgtgtctagttgcttccactcaacattatgcctgtgagtttcagccacgttattgcatgtagctgtagtttgttctttttcgttgctgtatactattctattgtgtgaactctcactgtttctctatatctgtgttgatgagtattttataaagaaagcttctgtgaatatttgttcattttttggtgaacacacatacacatttgtgctgggcatgtacctgagagtgaagtggatggtttcccagttatccatttgttcagcttcaggaaatactgcccagcggttccccaagtggctgcacagtaatcccaccttatccaccggagatatgttctgagacccccagtggatgcctgaaaccccaaataatgctgagccctatatatactctttttttcctatacaatcacattatacagggagggtggtatacacagtgcagacggggtggacaaagggatgattcatgtcctgggtgggacagagtggatgatgagagacatcatcatcctacttagaatggtgcacaacttaaaacttacaaattgcttatttctggaattttctatttaatattttcagactgtggttagctgcaggtaactgaaactgcaaaaagcaaaaccaggccaggcgcggtggctcacgcctgtaatcccaacactttgggaggctgcggtgggtggatcacgaggtcaggagatcgagaccatcctggctaacgtggtgaaaccctgtctctactgaaaatacaaaaaatcagtcaggcatagtggcaggtgcctgtagtcccagctactcggaaggctgaggcaggagaatggtgtgaacccgggaggcggagcttgcagtgagccgagactgcaccactgcactccagcctgggcgacagaccgagactccgtctcaaaaaaaaaaaaaaaaaaaaaaaaaaaaagcaaaagcaaaaccacagatcataagaagtatggggtgagggtgatattcgtagtattttatcaaccatctctactgtttagggcagcagccaattagagcagaccctggctgggccaccaattaacctaagcttgtccaacccaccttattttgttgttgttgttctgttttgttttgtttcagtctttcagcagcctgaagccatggttttcagattttgtctctagtaatatacagaaaagaaggatgaggaaggggttttactggcccaatcagaaacagaaactaagaacctatgactgtattctctcccttggacaccgttaactgttaacccttacttgctggatcctggcaggggaaagggcagcctggggaggcggatgttgaggaggggctaattaccaatctggtatgtaagtattttgatagttttacaaatgaggtgtatgctgactaacagccacccctggtgtggatgtgattggcagttccgagagaaatatggggacgtcttcacggtacacctgggaccgaggcccgtggtcatgctgtgtggagtagaggccatacgggaggccctggtggacaacgctgaggccttctctggccggggaaaaatcgtcatcatggacccagtctaccagggatatggtgagggcttcagaggcactgggagggggcaggtgggggtgcatcagggaagggagtatatggggggaagaaggactcagagccttcttccaacttcttctgcaaccaactcacacctcccctgcactgcaggcatgctctttgccaatggaaaccgctggaaggtgcttcggcgattctctgtgaccaccatgagggacttcgggatgggaaagcggagtgtggaggagcggattcaggacgaggctcagtgtctgatagaggaacttcggaaatccaagggtgagtcctgggagacgaataggaaagaaaggcaatgaaacactgagagatgcaggcacgggaatagaaaggcagagaggtatacatgggcagagacagagacagacgaaaccagagacatgatctgacagaggtatagggacagagagtgagagagacaggggaatagagagggacggggattggcaggagagaaacagagccagggaaagagagagatgccaggtgtataatgtccaaaagttactcaaagaggctggatgcgatgactctcacctgtaatcccagtactttgggaagcaaacagcctgggcaacataatgagatcctgtctctacacaatataaaaaagaaatgagccaggcatggtggtgtgtgcccgtagtcccagctacttgctatggtgggactacaggatcacttgagcccaggaggttgaggctgcagtgagctgtgattgtgccactgcactccagcctggacaacagagcaagatcctgtctcagacaaacaaacaaagaaacaaacaaaccctgaaagacatatattttcatggatcaattgtgtctatcgaaggcaaaatcagaagttatgtaaaagaaagcaaagagataaaggaaaaaactacagacatttaacaaataatgacctgtgttttccttgccctgggtgaagtgctgatgagctggcagtgagcaagcaggccaggtgggatgttctgcccgggtgcagctggaggggtcatcaaagaatcactaggttatttttgagttctccataactgggtgtctgtgggacatgtaggtgacgggtctctggctagtacctccatctcatttatgccaggtgtttaccatctctcttatcaaaatttctcaagagactctgggacgtaaatgcagaggctgcgtggggaggtagaaacacaggagctataggcaaacagggacaagaagactgaagagaaggacaggaagaaacagagtgacacaggcaggaggaaagagacagatggagggaccaaaacaaagagatatatagactgggcatggggctcatgcctgtaatcccagcactttgggaggttgaggctggtggaacacctgaggtcaggagttcaagaccagcctggccaacctggtgaaaccctgtctctactaaacatacaaaactagccacgcatggtggcacgtgcctgtaatcccacctactcaggaggctgagactggagaattgattgaccctgggaaatggaggttgccatgagctgagatcatgccactgcactccagcctgggtgacagagtgagactgtgtctcaaaaaaaaaaaaaaaaaaaaaaagagagagagaaatatacacacagagagacagaaagaaacaaaggcaaagagaaattgaggcagaaaaaattagaggagagacagacagacaaggctcaagaaagggtctgcagaggaatgagagaagacaggcaagtgagacccagagagaggctgcactaacctgacattcttgggtgctcacagaccaccctccctccagctggggccagtgctgagcctggtgtatacaggtatcacttaacaagtgcagaataatgcccggatgactggagagccctagatgtagaaagaagagattatgggggagtaacaggtgggggtagaaagatggttttttatttgttttaaattagggacagggtctcactctgtacccaggctggagtgcagtggcacgatcatagctcactgcagcctcaaactcctgggcccatgtgatcctcccacttcagccccctagactccttcaactgggactacaggcatgtgccaccatgtctggctacatttttaacttttttgtagagacaggttctccttatggtgcccaggctggtcttgaattcctgatccttttgcctcaggctcccaaagtgctgggattagaggtatgagccactgtgcccacccagggctttttaatttatacaagcaattgattaaacacctactctgcccagcccctacccctgggatttagctgtattcactcccagagtcagaggtggggccggagaggaggtgcagagtgagaaccggctgcatggactcgatagctgtgttgcctgggtctaaatcctggcctcaggaatgagtagctgtgcaactttggtcaaattactcaacctctctgtctgcccatctataatttggagctaataatcaaattgcatctgcctcacattgttgtagtgagagttcagtggaattacacgtgacgtgctggtacataattagctgttatggttattctcatgtttaccattactgagtgatggcagacaatcacacagagataggtgacagcctgatgttccccaggcccttcagtctgtgtccttgacctgctgcttcttcctaggagccctcgtggaccccaccttcctcttccattccattaccgccaacatcatctgctccatcatctttggaaaacgcttccactaccaagatcaagagttcctgaagacgctgaacttgttctgccagagtttcttactcatcagctctatatccagccaggtccaggagagggagaaggagagggagggtgggggtgaggtgaacatccaggacacacgagaaaaggatgacctgacttgggggctcagaaatgcagcttatccctggaagaaatgcagagaccacgtggagtcagggacatggagacctggagggaggggaggcggtgagacagggatagagacagtgagagagagaatggggcacgatggggaggcagaaacagagtcagagagagactgagagaagaaagatgagcaaaaacaagacaaagaagggcagagatcaagagatcctgagagacagagttgatgagaatgaatgtgaaagagagggagagagagaatgaatcaggctttgggcttgatctctgctcttctgctcctggatgtctttttttttttttttttttttttgagacggagtctcgctctctcagccaggctggggtggagtggtgccatcttggcttactgcaacctccatctcctgggttcaagtgattctcctgcctcagcctcccgagtagctgggactgcaggcatgtgccaccacatctggctaagattttttttttttttttttttgagatggaatcttgctctgttgcccaggctggagtgcagtggtgcaatctcggctcactgcaacctccacctccctggttcaagcaattcccctgcctcagcctcctgagtagctgggattacaggcacctgccaccacgcctagctaatttttttgtatttttagtagagacagggttttgccatgttggccaggttggtcttgaactcctgacctcaagtgatctgcccgccttggcctcccaaagtgctggaattacaggcatgagccactatgtccagcctactcctggttcttctgtatgcttgcttctctgtctttggtaaagctcctcacctgaagaaattcaaggatacaagacaataaggaacagcatttcttcattttctcccattgctccttctccctgtttttttttttttaaaaaaaaaaactttccacagattataaaggtaatcttctgctcttttaaaagaaaataataaaatgtctccttattgattaacctggaaatatgcctattacatattaaatttaagaatatcaagctgcagaacagtatgcatagctgtagtttgttgttgttgttttcagacagtatcttgctctgttactcaggctggagtgcagtagtgtgatctcaactccctgccacctccacctcccaggttcaagcaattctcatggctcagcctcccgagtagctgggactataggcgagcgccaccacacccagctaatttttttgtatttttagtagagatggtgtttcaccatgtcggccaggctggtcaacatagctacagctcttaagcaggggtgtatgttggattcacatgtggggttgtcacagttatggattttcaggaccctactttccaggcggtctgatctggaaagtctgggatggggtccaaggtgagtacttgtaacaagcccgaccaataattctaatgttctcctcccaccgagaaccacagagaaaagtctggaaggagacccaccagacagttaacaatggttatctctagaaggagagattaagaaggaattttacatcgcaatatacgtttgcatttttgcaattatttgcaataaattaggcattccattcttcatcaaagtaatagaaataacctccaaaatacatagtcctaacatgtcagcaggcttatcttgtgtaagaatcattttattaatgtctgacacagcaagggagatgaggagaggagggaagagggagagaaaagtatgagaaagacaaataaacaggccgaggtagacaatgggtgacacagaaaggaagtgagacagagactaagagagatagaaaggagagaggcagggagatggggcagaggccaagaaaaagacagaaggatgagggaggaagatgcagaaagaggtaaatgtgagatagatcaaaggagatatagagtcagtgagtgaggggttcagaggcagaggggagtggggaagtggggttcccatggagggattggggcccaggaggcgctctctccctgtgacctgctagctcagccctaggcaaacctcaccaccccttctttcttgcagctgtttgagctcttctctggcttcttgaaatactttcctggggcacacaggcaagtttacaaaaacctacaggaaatcaatgcttacattggccacagtgtggagaagcaccgtgaaaccctggaccccagcgcccccagggacctcatcgacacctacctgctccacatggaaaaagtggggtctgggagaggaaaaagggaagggaggggagggagggcaagatagagaggtgagaagagggagggaaaaggggtagggaaggggaagatggggagtgaagaacaaagattagggaggggagaatagtgaaaaggaggagagcagatgaggaaggaaagaaagatgaggtgaaaggaaggagaaaataggaggaactgagatggagagagagtggtggtgggaagtgggggagagagagagagggagagagaagactggctgaggaaggaatttggggcaagagacaaaaatacagcaacaggagaaaagactcacggaggtagaaagagactgggagacaaaaagagagaaacacatcaaaaagatgtggagagagatagaaacagagccaggcagagtaaaaagaggctgagagagatgagttagagatgtgcagctggacatgtagaggacagagaaaagcaaattgggccagataatgtcaaagaccttcaggcaaacggagggcagccagggagacaggcgtgtgcacagcaaggctacagcctctcctgaccctgccctcccctccctactgtggacgcaggagaaatccaacccacacagtgaattcagccaccagaacctcatcatcaacacgctctcgctcttctttgctggcactgagaccaccagcaccactctccgctacggcttcctgctcatgctcaaataccctcatgtcgcaggtgggccagggacagccagtcaagggggtcttctggactgcagaaatggggctatgggtaccacctggatgagagaggggatgctggcttcctattccgggatcactgtaggctctggactagcttccaatcaagccaattctgttggtggatgcatggacgcatgaagaatctgtccatgcgttctcccattgttttcttccatcactcaaggatcttttttttttttttaagacagagtcttgctctgtcacccaggctggagtgcagtggcgcgatcttggctcactgcaagctccacttccaggtttcatgccattctcctgcctcagcttcctgagtagctgggactgcaggcgcccgccgccacacccggctatttttttgtatttttagtagggatggggtttcaccatgttagccaggatggtctcgatctcctgatcttgtgatgtacaaatttagggagtacatatgcagttttgttatgtgcgtaggttttgtaatggtcaagttagggccgttagggtatttatcacccgaacagtgtacattgtacccattaagtaatttctcatcattcacctcccccttctgctccctcgctcttcttagtcttcactgtctgttgttcctctctctgtgtccatgtgtacacattttgtagcactcacttatgagtgagaacatggaatatttgactttctgtgccatgacttaaaaattgatccgttcatccacttatcttttcatctattctttgtttaatttattaattaaagaatgtgtactcactgattttttcatttatgattcatccaaggacatatactgtgtcattcatttatttggattacttgatccacaagttgatcctttgaaacagtgatatgttgatggacaatttgtcattgattcattggttcatttattcattcattcatgcattcttccatccttctatgaactaggtttcacccttatccttccatcagtcagtctttcaattcacccttaatccatccatgctttccttcatttatcacaataattcactcatttattcacctctgatctatttatcattcaatccagccattcatttattcctttatttactcatacttcactaatttacttattcacttgttcttccataaatctagccattcatgtgattattcattaattgggttcattgatttctttgtctatggaccattcattagtgattaattaatcaatcaatccatctattaattggtaagtaaatatatacatccatttattggtttgttcatttcttcatcaatctttccttccatgaattgatctattgattgattgattgatgtttttatccagttgttcatggattcatctattgttctattacactgttatatacctgaggaccaagaatagtgtctcacctataatatacacacaataaatattagtttattttctactcatcttagagagggtgttttgatttgtggcctggagttcttaatctgaaattccatgcaaaatcgtgttatgtgtgtgcatatgtgtgtgtgtacctgtgcatgtgggaagaggatccataatagtcattagatttcaagcagtgagaattcttgttgcttccttcctgctctcctcaccccacgctgattgctttgaggagtatcaaagatctaagcctttactgtaggtttttaattggtcaatagaaagtagtgtccctgctgaaaggtctctttttaaaaaattttctttccttcttttttcttttttttaattttgagacagagtcttgctccgtcacccaggctggagtgcagtggcatgatctcagctcactgcaacctccacctcctgggttcaagcgattctcctgcctcagcctcctgagtagctaggactacaggcttgcaccaccacacccagctaattttttgtatttttagtagagatgggattttgccatgttggccaggctcatcttgaactcctgaactcaagcaacctgcccacctcagtctcccaaaatgctgggattacaggtgtgagccaccatgcctggcctcaaatgcctctttaaaatgagattcattcatcttcttctctgtgcagagagagtctacaaggagattgaacaggtggttggcccacatcgccctccagcgcttgatgaccgagccaaaatgccatacacagaggcagtcatccgtgagattcagagatttgctgaccttctccccatgggtgtgccccacattgtcacccaacacaccagcttctgagggtacaccatccccaaggtaagactggctgcacccccacatccctcctgtgtgggcatcctggattttcttaatccccaaactcaaccttttgttagcttctcaattgagtccccttgtttttgtttttttctttttcttttttgtgctgtgtgtgtggagggtgggcagggaatggcaatatcttttgatcttgtgatccttcctcaggacacggaagtatttctcatcctgagcactgctctccgtgacccacactactttgaaaaaccagacgccttcaatcctgaccactttctggatgccaatggggcactgaaaaagaatgaagcttttatccccttctccttaggtaagctggacccacagtttctttcccagacaccagagggcaggtcctatcctcaacttgagaaaaaaaatgacaggtccttattaattgagcacttaatatattccaattgcttcacctgccttatccccttccatcttcactacaaccctgtaaggaggcttgagaaagaagatgacattcccaaaggcacatctgggcaagcaggaacttgggcaagtattttaacatctctaaacctcagtgaattcattttcttaaaaagaaaaaaatctgttgagcaccgctgtaagcccagtgctgtactaggggctgaagacaatgcatcaaacaggtcacacggagacagggttcctgccccaggaaatttaaagtccagcagggaagatggacattcatcaaataataataaaataatcatctcatgaaatgaatgaatgcctgcaacatgcttggaactgcctggcacaaaggacatgctcacggggcaattattattataattagacataattgtgataagtgctctaaagggagctttgggagcacaaaataggaaatagtagctaatcttgtggtgggtcattaaggaaaagcttaccagaggaactggcttccaagccgagatgttcatgggtgggcgtcaatcaatgattgcaaagtgtgttccaggcaaaggaaacagcaagggcaaaggctaaaggtggaaatgtgatggtaccattgagaatctataggaagtccagtgagccttgggtgtagattgcggaagggaataagacaaagggctcagctgggcaggaccttgaaggctgtggaaggagtttggatttatggtctagcactggggaggtggagaaggtcttgacgtgctctgacttgtcccagttctcatcctccactctttggctggttaagagaaaaactttaggcaaattaaacttagcagagtctatttgagcaaagaaacaattcatgaattgggcagcacacggaaccaggaaaggttcagagagctccacccagcaatgtgatcaggcactatttatccatagggaaaggaactgaggtacagaaacagcctgattggttacagctctgtgtttgccttatctgagcatgtctgggcagcttgtagcctgtgactggctgaagcttggctgccctgattgtccaaggttacttgttacaagaatatactctcaagttacattgcagtttgtttacatgttgagttacgttacagtttgttatgcagggaggctgctttaggccaaatttaatttaatttaacacgcaccatccatgaaaggccccagaaacaaatccctagtcttgagtttcatcagtgacttcagcaacccagggtcctggcccagcccctggttttgtgcagtacagtgacctccttccacattttatcttcaatgacagttaggaacacatggggtgatggcttgagggtcaatgtcttctctcaattttgctgtcttgtttttttttttttttccttttttgagacaccgtctcgttctatcacccaggctggagtgcagtggcacaatctcagctcactgcaagctctgcttcctgggttcatgccatcctcctgcctcagcctcctgagtagctgggagtataggcacctgccaccatgcccggctaattttttgtgttttttagtagagacagggtttcaccgtgttagccagaatagtcttgatctcctgatctcgcgatccacccgcctcagcctcccaaagtgctggaattacaggcgtgagccaccatgcctgagacattatcttaaggtttctttttttttttttcttcagacagggtcttgctctgttgccctggctggagtgcagtgtcatgatctcaggtcactgcaacctctgcctcccaggttcaagcgattctcctgcctcagcctcccaggtacctgggactacaggtgtgtaccaccatgcctggctaattttttgtgtttttagtagagatggggtttcaccatgttagccaggatggtcctgatcttctgacctggtgatattccttcctcagtctctcaaagtgctgggattacaagcgtgagccattgtgacaggcctgctattttgttttaagagaggcagagatgtagggaaataaggacagagacagataagtaacaaagataataagattgagaaacatagttggggacaaagagggaacacactgagagatagagatggggagacagtggcagaaggacagacagcaggtgaacatcaggcagtatacggagaggaagagagagagacacacacagagagagccacataaggagaagaggaggaggaggaataagaggagagggaggaggaaaaggaaggcggaggggagaaggaaggagggaaaggagagaaacagaataagagataggaaaaagagagagtgacacaagaagagaggaagaaagaatgaaggagacaaataaggtatctttagagggagatgaaaagaaagaaggagagagagagagattggggagcaatcagattcaaatagatggagataggaggttaagcaagatggaagaaagccaaaaaaggagaggaaaagaagaaaaactgtgtctgacaggtatagacagagaaaaagacaggagtagggctgccaggggcagaaagaaaggtataacccaagccaaaagggtactgcagccaaagaaattcgaaaggtgtccaaacagatggccccagagatggggagggcgtgatgagagggagataataagcatcaggctgttgtggaaaatgttaggtcacacaaagagctacagaagaacaggcccagagacctgcctgtttctaagctcatgttgcccaacttctggatgtgccaaagggacatggacccatttccagacacctccacatagacacacttgtccaacaacttggcaggcatagggaatgcctgaaaactcacacttgacatggcctttccaaggtttgcagattatgaaacactgaagtgaagggaaaggctccctttgtctctgcctcagctttttccagctccctttgttctcatttttctcccaatctgtggtttagaacctactgggggttccttgcacctctgagaatcggtggaagccatagaccctccctgtctcatatgcatcagtcccattcacaatttatatacaatttgggttttttaccccctgagctcttgaagcctgtggatctcaggctgagaccagaaaacagcctagagacacagacacagacacatggccagaaacacataccccacagatacccccagaaacaaacacaaggcgataaccaaaccttaaggctccttagcagaagccaagtgctgttctaagaatttttacaattgtctcctttaacctcagaagagccctttgagagaggtgccattctccccgtatgagaagtgaacactaagaatgttgtcataaatgtgctcacacacatgtagaggtacacacacacacacacacaaccagaagtgggtcattatacactgtggggatcaccaaaccctttggaactgtaacagaagctacaaactctctactagaaaaatgaacatggcgccgggcgcggtggcccacgcctgtaatcccagcactttgggaggccaaggtgggtggattacctgaggtcaggagttcgagaccagcttggccaacatagtgaaaccccatgtctactaaaaatacaagaaattagccaggcgtgggggcaggtgcctgtaatcccatctacttgggaggctgaggcatgagaatcgtttcaacaccctgagaggcagaggtcgcagtgagccgagatgtcgccgctgtgctccagcctgggtgaccgagagagattccatctcaaaaataaataaataaatacataaataaataaataaataaataaagagattgagagagagagagtgagagcgagagcgagagcgagagagagagaaatgaacatggcacatccattcaaagatttgcacctggtttcagagcagcttcctaaaagtccaccctgaattgtaggttaaaggccagtcttatgcaaatctcttgcagtggacatacatgtctgggcttagggacatggcagagcgaagtgtatgcacctgccctgtgcccatgctggtgaccttctgtgcccacagggaagcggatttgtcttggtgaaggcattgcccgtgcggaattgttcctcttcttcaccaccatcctccagaacttctccgtggccagccccgtggctcctgaagacatcgatctgacaccccaggagtgtggtgtgggcaaaatacccccaacataccagatctgcttcctgccccgctgaaggggctgagggaagggggtcaaaggattccagggtcattcagtgtccccacctctgtagataatggctctgactccctgcaacttcctgcctctgagagacctgctgcaagccagcttccttcccttccatggcaccagttgtctgaggtcgcagtgcaaatgagtggaggagtgagattattgaaaattataatatacaaaattatatatatatattttgagacagagtctcactcagttgcccaggctggagtgcagtggcgtgatctcggctcactgcaacctccacccccggggttcaagaaattctcctgcctcagcctccctagtagctgggattacaggtgtgtgctaccatgcctggctaatttttgtatttttagtagagatggggtttcaccgtgttggccaggctgatctcaaactcctgaactcaagtgattcacccaccttagcctcccaaagtgctgggattacaggtgtgagtcaccatgcccggccatgtatatatataattttaaaaattaagatgaaattcacataaaataaaattagccattttaaagtgtacaatttagtggtgtgtggttcattcacaaagctgtacaaccaccaccatctagttccaaacattttctttttttctgagacggagtctcactctgtcacccaggttcgagttcagtggtcttgaactcctgatgtcaggtgattctcctagttccaaatgttttcattatctccccccaacaaaacccatacctatcaagctgtcactccccataccccattctctttttcatctcagcccctgtcaatctggtttttgtccttatggacttaccaattctgaatatttcctataaacagaatcacacaatatttgattttttttttaaaactaagccttgctctgtctcccaggctggagtgctgtggcgtgattttggttcactgcaacctccgccttccaagttcaagagattctcctgcctcagcttccaagtagctgggattacaggcatgtggtaccacgcctggctaattttcttgtatttttagtagggacatgttggccaggctggttgtgagctcctggcctcaggtgatccacacgcctcagtgtcccagagtgctgatattacaggcgtaatatgtgatcttttgtgtctggttcctttcacgttgaacgctatttttgaggttcgtgcctgttgtagaccacagtcacacactgctgtagtcttcccccatcctcattcccagctgcctcctcctactgtttccctctatcaaaaagcctccttggcgcaggttccctgagctgtgggattctgcactggtgctttggattccctgatatgttccttcaaatccactgagaattaaataaacatcgctaaagcatgacctccccacgtcaagaggtgatctgtgccattttgtgtgtgattcttttattgtcaggtccctagggatttttctggaaggaatgttggtgagaacgcctccctcacctcagtgacaactctgtgaagggccaaaccattgtcttgctcgtcactgtactctcaatacagcatgtggcatatgacaggtgttcaaaatatttggtgaggaatgaatgaatgagtggctaaatcagccacccactacccccacagcccacagaaaatggagctaggctactccatcagactgtgtctcctccatatcccactttcttctttggcccagaataaattatcatccccaaagggcccaggatgcccccagttctgcctgccagttactctcaatcccctgtgctgcaatgccaccttttgataaagcttagcgctattcttgaagtggaaccactctaaattcagcctccaggctggacacggtggcttatggctataatcccagtactttgggaggccgagtcaggtggatcacctcaagtcagggggtcgagaccagcctgcccaacatacagaaaccctgtctcaactaaaaaaatagaaaaattagctgggtgtggtggcacgcacctgtagtcccagctacttgggaggctgagacaggaaaatcgcttgaacgcaggaggcagaggttgcagtgagccaatatcccaccactgcactccagcctgggtgacaaagcgagattccatctcaaaaataaataaataaataaataaatacaacctccacatattccaccagcaggaccaccacccttccctgagggagttgttgcaagtttaatatctttatcgcaaggatacatcagccagcctgtggccaatgggaagctggttctgggactcagccctgagatgctaaccttttggcctctgcagcacctgccagctttaggctccttgtagcctctgaagagttagcagggactctgcctgtgcaaatgcatggcacacattccctcaccaaccacagaaataaaacaacaaacagagaaacatgtcttttaagagtgacagcagaatctgcccggcttatttcacctaacataacttcctgcagttccatccatgttgctgcaaatatcaggatctttttcttttttaatggctgaatagtactcccatctgtatgggcaccatatgaacacttaggttgattccatatcttggctgttgtgaacagagctgcgaaatacatgggagtgcagacatctcttcggtatacagatttccttttattggaatacacttagcagtgggattgctggattgtatggtagctcgatttttaatgtttttcttttttgtttgtttatttttattttattttattttttttttgagatggagtcttactctgttacccaggctggagtgcagtggtatgatcttagctcactgcagcctctgcctcctgggttcaagccattctcttgcctcagcctcccaagtagctgggactacaggcacccaccatcacgcctggctgattttgtatttttagtagagatggagtttcaccatgttggccaggctggtcttgaactcctgacttcaggtgatctgcctacctcagcctcccaaagtgctgggattacaggcataagtcactgcgcctggcctatttctacttttttttttaaggaaactccatattgttcctcaaagtggctctactaatatacattaccaccaacagtgtacaaaggttccatgggggattctttcagattgagtggtcagagagggcttctttgagaaggcttctgagagttggccatgagaaggtgtggtgagaagccttctcagctgagggaacagcaaggtaaaaggcccggaggtgagaaagcaaacttggcaccttccgggagcaagcaggcattgcctctgataatgtttcctcctggtaaaatgacagctctgggagggcagggttcttatttcctatctatctatctatcatctatctatctatctatctatctatctatctatctatctatctatcatctatctatcatctatctatctatcatctatctatctatctatatctatctgtctatctaatcacctatctttctatgtatctatcatctatgtatctatccatctgtctttatttatttatagagtcagagtcttgctctgttgcccattgtattagtccgtttttatgctgctgataaaaacataccttagactgggtaatttataaagaaaaagaggtttaataaactcacagttacacatgactggggaggcctcacaatcatgctgaaaggcaaaagtcacatcttacatggcgctggcaagagagagaatgagaaccaagtgaaaggggttttccattataaaaccaacagatcacatgagacttattgactagtatgaggacagtatgggggaaaccacccctatgattcaatgatctcccaccgggtccctcccacaacatgtagggattatggcagctacaattcaagatgagatttggatggggacacagcaaaaccatatcacccagactggagtgcagtggtgtgatcatggctcattgcggcctccaactcctggattcaagcaatcctcccatctcagcctcctgagtagtgaggactaagtttgtgataccacctctggctaacttttaaatattttgaaaggatgtagtcttgctattttgcccaggctggtcttgtactcttggtctgaaatgatctccccatcttgacgtcccaaagcactgagattacaggtgtgagccattgcacctggcaggttctcatttacttaattattactgttgtcatggtttgctttggtccctgtgggttcccccaccctccagaacaagtgcctgacatatagtagggttcacaataaatatttgtggagtaaataagagctgagccttcaagggatccaaaatacttgcatggagtttttctaggtgggtacaatgccacccagctgcatgactatttcagggtgttcattggctcctttgggtgatattttgacatctatataagaactcccacttctccaaatctgggggccacatctttagagttctcagcttcccgtctgtcaggaatgaaggagataatatcactgattggagccagattgtctggatgttgaatcccagctccttgctggtgcccttgagaagtgacttaagccctctgtgtgccttatttctgcctctgtaagcagagatcatcatagcacctctaatgtggggctgtttgaagattcagtgaggtatgtgcaaagagctttttgcacttccaaaaagtgtctgggatatcattgtgcactgtaagaatgcactgtaacaattatcattgagtcttcttgttgggattaaaagagatcaggtctgtcagggcctggtacagaagtggtatcagaaaaataatgacgtgccggctgctcacaaggcttcccaggccaagctggtgtgggaaagagagtttctggagtaccagatgagttggtctcccctatgtgagacacccatggggagccatgggcggcctctgaggagaaaagtctccttattgtctttatgtctttatgctcccagagcatacctgctcagcggcattccacaggttgctcagggagataacacttccttaaagcagtgaagtacaatcaaacatcttggcttcttctgaaacccactcccacccatttcagtcctgataagattttaagtagtttagacacacgcctttgctcaaggaaattcacagaaactgccactgctctacatcttattgaataactcacgagttctccttcattgattaatcctttttctcatcccttccttgccttctcatctgccctaagaacaaagagcttgtaagccaataaattaggcagagccaaagagctctgggccatgagcaagcctctgacactctggtcccccggacccaccttttaaattctcactctgtttctttctaactctttagtctccgttggactcgcggtacctgcagggtggtgtggggctggtttccccaacatctggcgcccaacgtgggactccccgttatctctacaaataatctggtgaaggaatgctagagcatggaaagtggaagatgacagaaaaagggtgcctgaatatgttttcacttcaagctctgtggataagtagtgtgcttggagaattccacggtaacctcgggaaaacgggtcaggctgagagtaaatttgctaattacttaagcttggtgtggcagttattgtgccacagaggggcaattgtgagtacccaaaatctcacatctttgttccagctcatagaaaagtattccccttggttcccggaatatggaaccatgaatgtaaaagactgcgacaagttcggagcagacttaaaatgagcacaacaagagggctacaatattcccttgtctgcttggtctgtgtggtcagcaatcaaaataccactggagcctttccacactgaggaggatgagaagtttcaggatgacatagaaaagtttaataatcaggagtttgatgatctgcaaagtgaaccatcacagtttagttttaaaaagggggagaaagggatatatgctaacctccaaaaacttatagaagaaacatttccacctactgcagaaacagtgccacccactgcgcctttaggggaaggtccagaatggccacccccgcctcagccttatgaatttttggaatgggagcctgagacatgacttgctgctcccattgttgcatgccccacaattaactatgttgaagggaagcttcaggctcacccaacagccaattatggtgagggaatgatccaggcttgtccaccttttaattatggtagaggaatgctgtgagcaggtccaaatacaaattacggtgcagggacaatccaggcatctatttaccaggcatgagatgtgggggatttggatgcttggcagtttctggtaattatttctccagctgaggagcccagacaacatgctgaagcatgctgggagccatttccttttaaaatattaaaagacttaaagcaagcaattggacaatatgggccaaattctccttaggttcattccttgttacaatctgtggcttataacaggcatttaatacctatggattgggaggcattagcccactctaccctgtcccccactgagtttctccaatttaaaacctggcggacagatcaagcaacaacaaatcaggcatgcagaaatgctcaagcccaacctcctgttaatatcacatctgatcacttgcttggaatcagacaggcatggggtactctaaattgacagatggtaatgggtgatgagactgttgatcagctcagaactatatgcctcagagcctgggaaaaaattcacgaccctggtactacttatacttcttttaactcagttcaacagggtccaaaggagccttatccagattttatcacccatttgcaagacacggctcaaaaggctattttggattctcatgtcaggaaagtgatagttcagctgcttgcttatgaaaatgctgatacagaatgtcaggcagaaattagacctattaagggaaaggcagatctaaatgaggaaaaaactttaagtgaatacattaaagcctgtgatggcattggaggcacttgaataaggccagccttcttgctccggcaatggctagactaagggtaacaaaaaacatatgagtgttccccagatcttgctataattgtggacagataggacatacaaaaagagagtgtacaaaaaaggcaaaacttaggaggaaaaagcagggaaccaggtacctgtcccagatgtaaaaaaggaaaacactgggctaatcactgtcattcaaagtttgataacagcggacagcccttgccaggaaatggacagaggggccagccacaggccctaattcaaaatggggcattcccaattcaggacaggacgtccctgactacaaatggggtgttcccagcccagtctttccctgtacaaatgtgcagcaattgttcccctccacagctaaaagtggggcagtagatttatgctgtactgaagctgtatccctccttcctggggagcctcctaggaaggtcccaatgggagcttatgacccattgccagatggcaaggtgggaaggtccaacttaaatttaaaggcaattcaagtacacactggagtagtggactctgattgccagggagaaattcaaattgttatctcctccactgttccctggagtgctaatccaggtgacagaatagctcaactgtggcttttactgtatattaatttagaagaaagctcagaaaaaagaacagaataatttggaagcacaaattcagcaggcaagcctccctattggtaaatcaagtctctgacaatagatctatttgtatggtcactattcaaggaaaacaatttgagggtgtggtcgacacaggagcagatgtgtccatcatagctctttatcaatgaccaaaaaagtggcccaaacaaaaggccccagtgggtcttgttggggttgagggtttgcttgtatctcaccaggagagaatcagcttcctgtctgggtacccacaagacatcttaagttgtgccatgagccagaacccaaggaagaggaaaagacctcggaatgtctctgcacccccagttcatcagatggctcagatgaacatctctgttgagcagatggaaaccagtaaaactcaccaagcaactccactgacctgggggcagatgaagagactagctcacgttgcagaagagaacctgaggtctcagaacaagccgctgaccaccagtaatctaatggtagctatgatggtggtaatctccttggtgtgtcaccttgtagctgaggcagatcaaaattacacttattggacctaaattccattcccaccactgattaggcctattacattgttagaccccccagtagaggtttatattaatgatagtgtctggatgcctggaccaacagacaaccaaggtcctactcatccagaggaggaaggaatgttgtagccatgacctttaatcagatggtcccattgcagagttgtgttaaacctccttttatgttggcagtgggaaaaattaatatcctagctgattctcaaaccatatcatgcctcaactgtcatctttttacctgcattaattctacctttaataaagataatagcatgttactgtttagggcccgagaaggagtttggatacctgttcccctcaatagaccttgggaggcctctccctctatacatattatcactgaagtactaaaaggaatacttaatagatcaaaatgattcatatttactttaatagctgtgatcatgggccttatagctgtcacagctactgctgctgctgctggtgttgctttgcactcttctattcaaactgtgggctttgtggatagttggcagaaaaattcttctaagctttggaattcccaaagccaaatagatcaaaaattggcaaatcaaattagtgatctccgtcaaacagtaatttggatgggagattggattatgagcttggagcaatgtgattggaatacttctgatttttatattacttctagcttttataatgccactgtacaccattgggagatgattagatgtaacccacaaggaaaagaagataatttaaccctagatattgctaaactgaaaaaacaactttttgaggtatctcaggctcgtctcaacctgttgctcggagctgatattcttgctggagccactgatggcctttctaataccaatcctttaaagtggattaaaaccatagctggatcaacaattgcaaattttattttggtttacgtatgtttatgctgtttgtttttagtctacagatgcagacgacgccttcggagagaagccagacactgtgaacgagacatgatagtaatagcggttattaataaaaaaaattaatagagacaaaaaaagggagacctgcgggaaaaagagtttctggagtgccagatgagttggtctcccccgtgtgagacacccatggggagccatgggcagcctctaaggagaaaagtctccttattgccttcatgtccttatgccctgagagcataaccgctcagtggcatttcacaggttgatcagggagatagcactccctagaagcagtggagtataatcaaacatcttggtttctcctgaaacccactcccacccatttcagttctgataagttaaagatcttaagtagtttagacacgcctttgctcaaggaaatacacagaaatcgccactgctgttcatcttattgaatgactcacgagttctccttcattgattaatccttttcctcatcccttcctcaccctcccatctgccctaagaacaaagagcttgtaaaccaataaattaggcagagccaaagagctctgggcctctgacgctctgtacttctctgactctctcctctgagtctctttttttcacttgtctaagtctatccagggctctgggtctgtctgtatctgcatttacacctttcggagtgagcatctctctagctgtccacctcttcctttctctgtgtgtgcctctttccatctctctctgcttctccctctagcagtgtcctgtgtctttctcagattccttctccctgtttcactgggtcccagttattccctccatcccttcccaccttcttccctccctccctctccttcccctccttccctcccttcctctcccccttctctctctctggcactttgtctttctttctctctctgtctctccctggttctttctgtctctccctttctttccatctctccctggtgctctctctctctctccatctctctttcctctccccatctctccctgtctccatctcttctttgtgtcctctgtctttctgtctctctctcttctctctctctcttaatctgtctcaacaccccatgtctccctggtgctctcggtctctctctttctcagtctctctgtctctctccattcccctccctctctccttggtgctctttgtccttctttctctgtctctctttctctcccatctccccctggtgctatctgtctctctttctctccatctctctctctacatctctttctctgtctctctctcttgccatctctccctggtgctctctgtctgtctctctctctctcttcatctctctcacccccccatctctcactggtgctcttaatctctctttctctctctccatctctctgtctccctcctcccctctccatctctccttggggttccttgtctctctttctctctctgtccatctctgtctgtcttctctctctctccctctctgtctctgtctttctctctctctctctctcccatctctccctggtgatatctgtctctttttctatctgtctctctctttcctctctctctctctccatctctctctgtctctttctctcctgcatctctccttggtgctctcaatctctctttctctctctccatctctctgtctctctcctcccctgtctatctctccttggtgtttttgtctccctttctctctcttctctctctctctccatctctctctgtctcccccatctctccctggtgctctctctctctcttgctttctgtccccctggaacctttgtctctttctctcttcttacccatgctctttgcccacatacctctccttctggctctctgcctgtgggaaggagtaaggcggaggtgattatgtaattgtcattattccagagggtggggtgagggatgaggaggagatcaggaaggaatactttctttcttctcacctatccatcaacctggcctcatagacacctcccccagctccatggctactgaattgggtgggtaggtcagatcactgcctcccttccccagggaaggtcagagaatgaatcgtacagaaccagagggattgaggggctcaggctgggagacaggctgcagtcaggtggagcttcccaaaggagacaggcaggcctcagggctctccctcagctgccagaaaaggtgaaaagcagtggaatcaagatgccagtggaggctttggggagctcccaactcagctgggctgaggactgaggaatccagtttctaaaacaccaaaacagagacctttgagagcagaaggagggatgcctggcttccttcccagccctctggctctggaattcaacaagagagaaagggctttgctgcttgtccccttttgggtgtgtgtgtgtgggcacttcttggtcactatagtgaacctgaaaattccataagtcattaccccacctactagagaaaaatgcaaaagatttacactcccagcacctacacttcagcactagggatctcctcaccctagccacaggtctcagtatctcttacccacttcctgatatatttgagcctgtcccgggctgtcgaggcaggctcaccacactctttccatccttcaatctatctatctatctatctatctatctatctatctatctatccttttaattttcatccttctgtccatatgtccacaaattcatcaaaaaatccactaattatttcttctatataaatatcttttgctctattatctatacatgtaccaattaactttccatttatccatctatccaatattccatccatccattcattaacccttccatcattcaacaacttattaatatttacatccacctttccaattattattcatctatttcaatccatccatcaattaacccttcacccatctattaaatctttcatccatccacccgttagtcattctagtcataaatgcttccttacatccatccatcaatcgagataatttcattaaatttccattaaatttctagtgcattggaataagactcaatccacacttctggtaatctctaaatgtttcttactacacagtaaccccttttgtgtaggcatatcaatgtacaggtgtgagcttctgtgtacacatatgtgcatgtatccagagaatccaagtggtgtctagaaaatagaattaacatccccattccagggcagtctatatggcattctcgcaatacctcctcccactttcctatgcattcatccacttatttatatatgtaagaaggttcaggtctccttcctgtaagaaacactctttactctgcccctatcattcctagactgattcccctttcctccaactcagtctggacttttgttttttttggggggggatcctgcagggagagaaccttactctcttgatttcttgattgaaccttgaaggttgggagtggcttccttgacagcacagtctagagctttcataatccctccctatcactgtctagcacagacttgaacacaggaggggaggcaggcagaagcatgagactgagatgtagctctggccaaaggagaacgacagaggtgtagctctggccaatggagaatgatggaagattctttgatgcttctccaggaagccagctacctactggaggagttccagaagaccaagggcttgggggccacagggggagggctactaggtgactatgtggttatggagaactcagtcatgagaagatgggccttactgggagaaagctttggaatgggagaaaagggaaaatattaagaattcactgagctttctggccaggtttcatattaaacttaacgtaagctgggtgcagtggcacacacttgtagtcccagctactcaggaagatgaggcaagatgatcacttgagcctgggaggtcaaggctgcagtgagctatgaatgtgctattgtacttcagcctgggagatagagtgagacccagtctcaaaaacaaacaaacaaaaacaaacaaaaaacataccagttaatgtggaagagacttagagtccacttgtctagaaaccctaatccttgtcatcactctaaaatgtgaaacaaacatttcacactctgaccacaaccactaggtccccaactccttcactgcatcactgccaatagcctgaggcatacactggccaactaggtctttgggtaaggttccaaagaatgcaaaaactgtaaaaggtcaaggctccctcctggtaaaagactgtttaaaataacatttcaaaatcttgcgttacatacagggaagtttttcaagagccataagaaattacgggcagcttttctaatgtctcataaagaaaagaggtggggcatgacagtccaaagaagtgattaaaagcataaaatttacagtcacaagatcatacccaggctctgccctcattagctgtggaagccagaagcaagtcatttacaacttttggggctttacctaactcatttgcaaaatgaagatgacaaaatcaacctcacagacttacaatcatgctcttaaaaacttcacacagttctttttttatatataagagaaatagaggtgggctagggctatgtttgaattcaaacacagacaggtacaggcaaatatctgatgttaatatgtacacagcatggcccatgtgtctgcatacagacaccagaatgcatgcacaaaaacatccatacgcttgtatgtagtcaacctgttgtgcacacgtacacacaaatgtgaatatgcacatttgttgaatatccacatctagctggacccagaaaagcacgtcatagacctcccccaagtggcatatcccaaagcacatgtgcactcaggcgacatgcacagacagacccagagactggcaagcattcaggaacagtggcatgaacacacatgcacctcatcaggtactcacacaaatgtgcttgggcagacataagttggaaaggatgcccacttatcaagcacaaacacacaccccacaaagcctggcgcatgcataaattcatctatcaacagggacatgctgaaacatacatgcacacagaaacctcaagcatgcacccagagtgacacacacacacacacacacagatgtataaataagggtaaaaatggcagaggcatctaggataaaccattggacaaaatgacacaaacatgcaaaaatgcacttgcacaaagggcagttgaggggaaggttgtcttgcagggaagaagaaagagaaagacagaaagacaagatcatagacaaggggagagagacaggtgggcaaagtcctatgcaggtctccaggccatctagaatagtatgagagtctaatgcttgcctgtcctcttgcagaaacttaaattggtgaatatggtaaattttatactatgtgggtttttttaaccaccatagaaatatataaatataatgaaatctgagctaatctccaaaaaaaaaaaggcacaatgtcacatatgaccaaaatctgcatatgctatcaggagctcacagactccctgagatccactgattaaagtttttttttgtttttatttttgttttatttattatttttattatactttaagtgttagagtatatgtgcacaacgtgcagggttgatagatacatctacatgcattgtgttggtttgctccacccattaacacatcatttacattaggtatttctcctaatactatccctctctcattcccccaccccacgacaggccccagtgtgtgttgttccctgtcctgtgtccaaatgatctcattgttcaattcccacttatgagtgacaacatgtggtgtttggttttctgtccttgtgacagtttgctcagaacgatggtttccagcttcatccatgtcgctacaaaggacatgaactcatccttttttatggctgcatagtattccatggtgtatatgtgccacattttcttaacccagtctaccattggtgggcatttgggttggttccaagtctttgctattgtgaatagtgcttcagtaaacataagtttcagtaaacttcttcctggtttagtcttgggagggtgtatgtgtccaggaatttatccatttcttctagattttctagtttatttgcatagaggtgtttatagtattctccgatagtagtttgtgtttctgtgggattggtggtgatatcccctttataattttttttttttttttttccaaggcagaagaatttttcttagtacagaacaaaatgaaaagtctcccatgtctacttctatccacacagacccggcaaccatccgatttctcaattttttccccacccttcccgcctttctattccacaaaaccgccattgtcatcatggcccatccccaatgagccgctgggcacacctcccagacggggtcgtggccgggcagaggggctcctcacttcccagtaggggcggccgggcagaagcgcccctcacctcccggatggggcggctggccgggcggggggctgacccccccaccaccctcccggacggggcggctggccaggcagaggggctcctcacttcccagtaggggcggccgggcagaggcgcccctcacctcctggatagggcggctggccgggcggggggctgaccccccccacctccctcccggacggggcggctggccgggcagaggagtcctcacttcccagtaggggcggccgggcagaggcgcccctcacctcccggacggggcggccggccgggcggggggctgacccccccacctccctcccggacagggcggctggccgaccccccccccccgcctccctcccggacggggcggctggccgggcagaggggctcctcacttcccagtaggggcggccgggaagaggcgcccctcacctccaggacagagcggctggccaggctgggggctgatccccccacctccctcccggacggggcggctggccgggcggggggctgaccccccacctccctcccggactgggcggcttgccgggcagaggggtcctcacttcccagtaggggcggccgggcagaggcgcccctcacctcccggacggggcggccggccgggtggggggctgaccctcccacctccctcccggacggggcggctggccgggcagaggggctcctcacttcccagtaggggcggccgggcagaggcacccctcacctcccggacggggcggctggccaggcggggggctgatccccccacctccctcccggacggggcggctggccgggcggggggctgaccccccacctccctcccggactgggcggctggccgggtggggggctgaccccccccacctccctcccagacggggcggctggccgggcagaggggtcctcacttcccagtaggggcggccgggcagaggcgcccctcacctcctggacggggcggccggccgggcggggggctgaccctcccacctccctcccggacggggcggctggcggggcagaggggctcctcacttcccagtaggggcggccgggcagaggcacccctcacctcccggacggggcggctggccaggcggggggctgatccccccacctccctcccggactgggcggctggccgggcggggggccgacccccccacctccctcccagacggggcggctggccgggaagaggggtcctcacttcccagtaggggcggccgggcagaggcacccctcacctcctggacggggcggccggccgggcggggggctgacccccccacctccctcctggacggggcgactggccgggcagaggggctcctcacttcccagtaggggcggccgggcagaggagcccctcacctcccggacggggcggctggccgggcagggggctgaccccccccccacctccctcccggacggggtggctgccgggcggagacgctcctcacttcccagacggggtggctgccggtcggagacgctcctcacttcccagacggggtggctgccggacggaggggctcctcacttctcagacggggcggttgccaggcagagggtttcctcacttctcagacggggcggccgggcagagacgctcctcacctcccagacagggttgcagcccagcagaggcgctcctcacatcccagacacggcggcagggcagaggtgctccccacatctcagacgatgggcggccgggcagagacgctcctcacttcctagatgggatggtggccgggaagaggcactcctcgcttcctagatgggatggcggccgggcagagacgctcctcactttccagactgggcagccaggcagagaggctcctcatatcccagacgatggggggccaggcagagacgctcctcacttcccagacagggtggcggccgggcagaggctgcaatctcggcactttgcggggccaaggcaggcggctgggaggtggaggttgtagtgagccgagatcacgccactgcactccagcctgggcaccattgagcactgagtgaacgagactccgtctgcaatcccggcacctcgggaggccgaggctggcggatcactcgcggttaggagctggagaccagcccagccaacacagcaaaaccccgtctccaccaaaaaaaaaaaaacaaaaaaaaaaaacgaaaaccagtcaggcgtggcgacgcgcgcctgcaatcgcaggcactcggcaggctgaggcaggagaatcaggcagggaggttgcagtgagccgagatggcagcagtaccgtccagctttggctcggcatcagagggagaccgtggagggagagggagagggagagggggagggggagggggagggggagggggagggggagggggagggggagggggagggggagggggagggggagggaatgggagagggagaggccctttataattttttattgcatctgtttgattcttctctctattctttagtcttcctagtggtctatgaattctgtgatcttttcaaaaaaaccaactcctttattcactgatttttctgaagggtttttgtgtctctatctccttcagttctgctctgatcttagttatttcttgccttctgctagcttttgaatgtgtttgctcttgcttctctagttcttttaattatgatgttagggtatcgattttagatttttcatgctttctcttgtgggcatttagtgctataaatttccctctacatgaaaaaatgctcatcatcactggccatcagagacatgcaaatcaaaaccacaatgagataccatctcacaccagttagaatggcgatcattaaaaagtcaggaaacaacaggtgctggagaggatgtggagaaataggaacaattttacactgttggtgggactgtaaactagttcaaccattgtggaagtcggtttgatggttcctcagggatctagaactagaaatgccatttgacccagccatcccattactgggtatatacccaaaggattataaatcatgctgctataaagacacatgcacacgtatgtttatagcggcactattcacaatagcaaagacttggaaccaacctcaatgtccaacaatgatagactggattaagaaaatgtggcacatatacaccatggaatactatgcagccataaaaaaggatgagtttgtgtcctttgtagggacatggatgaaactggaaaccatcattctcagcaaactatcgcaaggacaaaaaaccaaacactgcatgttctcacttataggtgggaattgaacaatgagaacccatgtatacaggaaggggaacatcacacaccagggactgttgtggggtggggggcggggggagggatagcattaggagatatacctaatgctaaatgacaagttaatgggtgcagcacaccaacatggcacatgtatacatatgtaacaaacctgcatgttgtgcacatgtaccctaaaacttaaagtataataataataaaataaaaaaaaaatttccctctacacactgctttaaatgtgtcccagagattctggtgctttgtgtccttgttctcattggtttcaaagaacatctttatttctgtcttcatttcgttatttacccaattgtcattcaggagcaagttgtttagtttccctgtagttgtatggttttgagagagtttcttaatactgtgttctaatttgattgcaatgtgatctgagagacagtttgttgtgatttctgttctttcacatttgctgaggagttcttcacttccaactatgtagtcaattgtggaataagttggatgtggtgctaagaagaatgcatattctgttgatttgaggtggagagttctgtagatgtctattaggtccatttggagcagagctgagttcaagtcctggatatcctttttaaccttctgtcttgatgatctgtctaatattggcagtggggtgttaaagtctcccattattattacgtgggagtctaagtctccttttaggtctctcaggacttgcttaatgaatctgggtgatcctgtattgggtgcatatttagaatagttagatctccttgttgaattgatcactttaccattttgtaatggccttgtctcttttgatctgtgttggtttaaattctgttttcttcgagactaggattgcaacccccattttttttttccttccatttgcttggtaaatcttcctccatccctttattttgagcctatgtgtgtctctgcacatgagatgggtctcctgaatacagcacattgatgggacttgattctttatccaatttgccagtctgtgtcttttaattggggcatttagcccatttacatttcaggttaatattgttatgtgtgaatttgatccggtcattatgatgttagctggttattttgcccattagttgatgcagtttcttcctagcatcaatggtctttacaatttggcatgtttctgcagtggctgctaccagttgttcctttccatgtttagttcttccttcaggagctcttataaggcaggcctggtggtgacaaaatctcttagcatttgcttgtctgtaaaggattttatttctccttcacttatgaagcttagtttggctgaatatgaagttctgggttgaaaattctttgctttcagaatgttgaatattggcccccactctcttctggcttgtagagtttctgccgagagatccactgctagtctgttgagcttccctttgtgagtaatccaaactttctctctggctgcgcttagcatttctttcttcatttcaaacttgatgaatctgacaattacgtgtcttggggttgctcttctcaaggagtatctttgtggtgttctctgtatttccggattttgaatgttggactgccttgctaggttggggaagttctcctgggtaatatgctgaagagtgttttccagcttgtttccattctccccatcactttcaggtacaccagtcaaatgtagatttggtcttttcatatagtcccatatttcttggaggctttcttcgtttctttttacttttttttctctaaacttcccttctcgcttgatttcattcatttgatcttcaatcactgatactcttccttccacttgaccgaattggctactgaaacttgtgcatgtgtcatgtagttctcatgccaacgttttcagctccatcaggtcatttaaggtcttctctatgctgtttattctagttaccattcatctaatcttttttcaatgtttttagcttccttgtgatgggttcaaacatcctcctttagctcagagaagtttgttattaccgactttctgaagtttacttctgtcaactcatcaaagtcattctctgtgcttttttgttccgttgctggctagcagctgtgatcctttggaggagaagtggtgctgtggtttctagaattttcagcttttctgctctggtttctccccatctttgtggttttatctacctttggtctttgatgatggtgacctacagatgtggttttggtggggatgtgttttttgttgatgttgatgctatccctttctgtttgttagttttccttctaacagtcaggtccctcactgcaggtctgttggagtttgctggaggtccactccagaccctctttgcctggggatcaccagcagaggctgcaatacagcaaatactacagaatagcaaaaattgctgcctgatccttcctctggaagcttcgtctcagaggggcaaccagctgtatgaggtgtcaatcggccattatttggaggtgtctccaagttaggctacatgggggtcagggacccacttgaggaggcagtctgtctgtctcagagctcaaacaccatgctgggagaaccactgctctctttagagctgtcagacagggacatttaagtctgcagaagtttctgctgccttttgttcagctatgccctgcccccagaggtggattctacagaggcaggcagccttgttgagctgtggtgggctccacccagttagagattcctggccactttgtttacctactcaagcctcagcaaaggtggtcgcccctccctcagccaggcttgccacctggcagtttgatcttggactagcagtgagcaagactctatgggtgtgggacccactgagccaggtgcggtatataatctcctggcatgccatttgctaagaccattggaaaagggcattgtttaggtggcagtgtcccaattttcccattacagtctgtcacaaaaatccccaactgcttgcactttgtgggtgaggcaatgccccaccctgcttcagctcaccctccatggtctgcacccactttctgaccagtcccagtgagatgaaccaggtacctcagttggaaatgcagaaatcacccatcttatgcatcattcacgctgggacctgcagaccagagctgttcctatttggccatcttggaacagctcctgattaaagttttcttgatcattggatatcatctgagtgggtggatggcttctctgccttgctcatatttatacatttcttccttcaggggcctcaaatccgtactgtcagggttatcacccatgttaatgattgatttatagggcttaagttagatttgaattaattccttcactgagcaacacgggtcctgtggatgattttcctataatcctgaggatcaggatctttgttgcaaaagaggcatgggcagcagtggcagaggtcctggtgagccatctgctcttaggagcatggatttcagtatgccaccaaatggctgcttttttccctcttctctctctttgtctcactttttgttttttgacggagacttactctgttttttaagatggagtcttgttcttgtcacccaggctggagtgcgatggcttgatttcagcttactgcaaactctgcctcctgggtttaagagattctcctgccttagcctcctaaataggtgggattacaggtgcccacgaccacactcatgtaatttttaaattttttgtagagacggggtttcaccatgttggccaggcttatctcgaactcctgacctcagttgatcaacccgtctcggcctcccaaattgctgggattacaggtgtgagcccttgcacccagctgtctctttctcactctccaaagattgctgtttcttgaatgactatccagtgggcccgtatattacaccaaatagagtcgttcacctgagtgctctatagattggggcccaatgcctggttgagacacataccagttggtggaaaggaagagtctttttcctgagcctagcatcattcacaggtgcattctaagatacacagataagtccaggctgagacacatgatccatggctatattaaagagggtcttaatcccatcatcctgtcttttaatgccaattaattaacaaaacttctgaccaaggtttactaagtctttaatggaggctcagtaggactcaacaatgaaatacaaggcagcacaggtcaaggcacaggctggctagaaggcagcagctgaaaatgcatgctaggtatcaggtagtggagtgggttagcaggttagcaagccaaagcaaaagaagaaagacccctggtgattgtagtcagaatctagcagctctgttcacagtgtcaattgttatggtcactcacagaagcagatggacacccacccaaaatttggaccaggtgtcaaaaccgatgatgccacacacacgatgagagggcatggaaagttttattgctcccataattgaggcctctagggagagtgggacaggcccttgatttctatggtggctaggggctgagggtggtgtgaaagtcctactgtactcctgcatgttcaggagcttgtgtggtttgaatcttccataggcaccaaaggagagagaacctgggctttctttattattattattgtcattactattattattattttaattgacacattataattgtacatatttatggagtaccgtgtgatgcttcaatacatgtgtacaaagtgtaaggatcacagatcccggtaattagaatatctatcaacataaaataatatgagagtgatatatcatcatattcataggtttttaagattattgcaccaaatatgaaatttcttgaaatatttcagtgaaatatcttgtgaaaccatttttagaaattttgcctaccttggtccaccctcccaccctcaaagattcatgtccctttcacatgcaaaatatattattcctcccctgaggttcctaagagttttgttccattacatcaattcaaagattaaaatcttatctgcatataatcagctcacaagtaccaaatctcgttatataaatccggtgtggatgaaacttctaggtataatttctcgacatctgtggaccctcagcagtgaagaaacaagttatctgttctcaatatacaatgatgagacaggcaataggataagagttatagacattcaagttcaagagagggaaaatggaagataaaaaggagtgcccagctcaaagcacttttgaaatccagatggaaaaactccagctgaagccccttggttaggtttcagggcccaggaaaacttctccatagtttttgatcctgtcctctgggcttttggctatgccctgtgtgtgctgttagtgctgctaaaacaaaatacctgaggatgggcaagttataaagattagaaatttatttctcatggttctggaggttgggaagtccaagatcaaggaaccagatggattggtgtctggtaagttctgctctctgcttccaaggtggcaccttgttgctgcctaccctggaggaaaggaatactttcctttcccatattattttacgtttattattattatactttaagttttagggtacatggatcttcaaggatccagaactagaaataccatttgacccagccatcccattactgggtatatacccaaggattataaatcatgctactataaagacacattcacatgtatgtttattgcggcactattcaccatagcaaatacttcgaaccaactcaaatgtccatcaatgatagactggattaagaaaatgtggcacatatacaccatggaatactatgcagccataaaaaatgatgagttcaagtcctttgcagggacatggatgaagatggaaaccctcattctcagcaaactatcacaaggacagaaaacgaaacaccacaagttctcactcataggtgggaattgaacaatgagaacatttggacacagggagcggaatatcacacagcggggcctgtcgtggggtgggagaatggggagggatagcatcaggagatatacctaacataaatgacgagttaatgggtgcaacacatcaacatggcacatgtatacatatgtaacaaacctgcacgttgtgcatgtaccctagaacttaaagcataataaaaaaataaataaaataaaataagaagaagaaaaaattaaatctaagtaaagcacttagaacaatggctggcacatagcaaatgctgtgttagttgctgttcttccaggccagaagcgacacagacaagttaccaccaggtggcgctgtattcctccagctccacaggttactcaggctcagagtctgggggtgcatctcaacagccctgaatttgaatcctgctctgccactgcctagtcgagacatttcactacatgcctagctgagacatttattagctctaggcctcattgtattcatttcatttcattacttttttttctttttttttgagacagagtctcactctgttgcccaggctggagtgcagtgtcacagtctcagctcactgcaaacttcgtctccagggttcaaaggattctcctgcctcagcctcccaggtagctggggttacaggcgcccgccaccacgtctggctaatttttgtatttttagtagagatggggtttcaccatgtcagccagcctggtctggaactcctgacctcctgtgatccacccacctcagcctctcaaagtgctgggattacaagcacgagccaccatgccaggcagaaagctggttttcttgagaggtgatgaagacttgaggctacgtcaatcatacctgagttagaattccagttccagcacctacaatctctatttcctttgataaatgacatcaccagtctgcccttcagttccctcctttagaaaatgagtattttaacaaaacctatctctgtataacatacagcaatcatgatgcctacaccatgaggattcagtgtgatactgtaggaaatcctttaacgcaaggcttggcacaaaaagacactcctatcaaccttaaaatattaagactaatattaaactaagacttgagggcttgttatatatcaggaacataacaccatgaattctcatagcaacatcatgagacagataatactgtcatgatttccatattatggaagagggaactgaggctcaaggagatgttacttgtggaaagtcacacatttgggatttaaaataaggcagcctgtctccagaacccatattactcaccattatgctagactggactccctcaccctcgtaacccatgttgtgtgcccaaaattcaagtttcttctgggcttgaggtctttgaacagctagaggtcttccatcccttccatcttctgtactggagtggatgattcaagaagtagaaaactggccaggtgtggtggctcacacctgtaatcccagaactttgggaggctgcggtgggtggatcacctgagttcaggagtttaagaccagcctggccaacatggtgaaaccccatttctactaaaaatacaaaaattagccaggtgtggtggtgcgcacctggaatcccagctgctcgggaggctgacacatgagaattacttgaagtggggaggttgcagtgagccaagatcacaccactgcactccaacctgggtgacagaatgaggttccatctcaaaaaaaaaaaaagaaaagaaaagaaaagaaatgaaaaaagggggaaaaatacaaaaccttctgctctttgaccatgcagattatgataatactgtagggtagtgatgctctgctgagaacatgcctcagaattgcctgcaggccttgttgaaacacaggttttcggtttctgatttagtaggtctggggtgtggtctaagaattcgtgtttttaacaagtttcagatagctgagtgtgtggtgtatgcctatagtcctggctacttgggaggctaaggcagtaggattgcttgggtgcaggaggtcgaggctggagtgagctgatattgcacgactgcattgcagcatgggtgacagagcaagaccctgtctgtctgtctaaaaaaaaaaagttccaaggtgatgctgatgctgcaggtctggaggctgcactttgagaaccactgaactatagcagagcaacgagtttgaaggaatctgggtccatgattgaccacaaggaggggagccaccttgccatgctggactaactgtctacttcaagagggacacaaaatagagaaagaaacttgtattttatttcagtgactgcattatgggatctgttggttacaacaacctggcctttaccttaattaatatagacatttttcaggctgttttcctgcagatgccctgatagatatctttgttcccaccagccttcagtgacttagccaacatctgtcagcaggtccagttctgtggattcccctcaaggtccagagcttgcttcctactttccttccttccttccttccttccttccttccttccttccttccttccttccttccttccctccttccttttcctttctctcttttcttttctttggcagggtctcactctgttgctcaggctggagtgcagtggtgcaatcacagctcactacagcttcgaactcctcggctcaagcgatcctccccgcttagtctcctgagtaggtggggctacaggcacatgctaccacccccagctaatttttttattttttgtagagacatggtcttgctatgtcacccaggctgggattacaggcattagccaccgtgtctggcttcagagtgatttttctacagcacaaatttgactgtgacttaccctactttaaatctcccatggctccaaaggctctaggaaaaagtcaaaactcctcagtgggacattcagagatttttctaagaatccaaaggacctctcatggtccatgtcccaaaatttcccccgatggaccctctgggctaaactttttctcttgttacctctagccaaacacaacacagttccaagcctcctgccctttcctcttgctgttcctcctccctgaggtgcctttcatggctcaggctgtggccaggatcagcgtggagtcagtagcttggatgggtggtccaggtccagtgctcactgagtgaccaggatctggtctcagaatgtgaccgaggtctgggtcagcgttcaggcggaagcaaggcttggggttcaggttgtccatttttcattttctcagaatatttactgacctgttgtcagctgatattttgagatatccaagccctgggccattctggcaccagatggagtccaagggctaggctaggatggctcctgggtgtcatagtcattgaaaggttcactgttgtattaaagaacccaaaacctcagtggggttcagtcacggggctccatatcagatctgagcatctgagtcctctgcccatccctggagccccaggatcccctccctgcttagttatcccagtgctccccctaccatcccacagctgcatttggtttattagaagggtggggagcagtaaatgtatttgaccaactcttgtgtaccaggtctagtacacacatgtcctcactgagtcttcaaaacaacactgtgggccatggacggttcctcacacctgtaatcccagcattttgggaggccgaggcgggaaaatcacatgagggcaggagttcaggaccagcctggccgacatggtgaaaccccatctctattaaaaatataaaaattagctgggtgtggtggcgtgcgcctgtaatcccagctactcaggaggctgaggcaggagaatcgcatgaacccaggaggcagaggttgcaatgagccaaaatcacaccactgaactccagcctgggcaacacagtgagactctgtcacaaaacctgcccccatcaaagcccccaaaaaaccctgtggaggagtgctattctcagccccattttatttttttaatttatttttgagacagtgtctcactctatcacccaggctggagtgcagtggcatgatcacagctcaccacagccttgacttcctgggctcaagtgatcctcccacctcagcctcctgactaggactacaggtgtgtgccactaagcctggataatttttaaatttttttgtagagaaggggtctcactgtgttgcccaggcttgtctcaaactcttgggttcaatcgatcctcctgcctcagcctcccaaagtgctgggattacaggcatgagccactgtgcctggctgcatcaccattttatagataaggaaacagaggcacagaggagtgaagacatttgctgaacttcacatcactagcggctgttccagaattcaggtagaacagttacttcagatctattctcctttgcatggccactccattctcattttacagatgagaaacggaggctcagtgaggggaaataggggaaatgtcttcattaggactgtacaggcaagggtaggatttgaacactgcattcctctttacagggcacagataagtacctgaggtattccagggctgtccaggtggaggcccttgccttggccacaggagtgcatggagtgggggtgatattagaacacaggtcaccgaagtgggtggatcatctgaggtcaggagttcgagagcagcctggccaacgtggtgaaaccctgtctttactgaaaatacaaaaattagctgggtgtgctggtgcttgcctgtaatcccagctactcaggaggctgaggcaggagaatcactggaacccgggaggtggaggttgcagtgagccaagatgcctccattgcactccagcctgggtgacagagcgagactccatctcaaaaaaaaaaaaaaaaaaagaacgcagttcagaagaattcctcaggagattaagggtccccacctgctttgtccacagagtttatgtccttctcaagaagggtgtgagagagatacacagagaaatgtctagggatacagggctcttttattgctagttttttttttttttttttttttttaagatggagtctcactctgttgcccaggctggggtgttgtccaggctggagtggagtactttagctgtggcagcccatcagtagctcccccagcccatgtttagctccctggacctgtctctagctccctccacctctctatgaatgtctatatctctccctgtgccaattacacattcctcaaacacttacagtgtgtcctccccatggcatattgagtctcatttccatcctcacaatgactctatagggtaggtgtattagttcattctcatgctgccaatgaacacatacttgacactgggtaatttataaagaaaaagaggtttaatggactcacagttccacatggctggggaagcctaacaatcatgacagaaggcaaaggaggagcaaagacacatcttacatggaggcaggcaagagacagagtgtgtgcagggaaaactgccctttgtaaaaccatcagatctcgtgagacttattcactatcacgaaacagcatgggaaaattcactcccatgattcaattacttcccactgggtccctcccatgacatgtggggattacgggaattacatttcaaaatgagatttgggtggggacacagccaaaccatatcattccaccccgacccctcctaaatctcatgtcctcacatttcaaaataaatcatgccttcccaacactccctcaaggccttaactcatttcagcattaactcagaagtccacagttcaaagtctcatctggtacaaggcaagtcgcttatgcctataaacctgtaaaattaaaaacaagttaattatttcctagatacaatggaggtactgccactgggtaaatacacccattccaaaaagagaaattggccaaaatgaaggggctataggccccatgcaggtccaaagtccagcagggcagtcaaatcttaaagctccaaaatgatctcctttgacaccatgtcttacatgcgggtcacactgttgcaagaggtgtgttcccatgacgtcaggcagctctgcccctgtggcttgcagagtacagccccgctcctggctgccctcacgggctggcattttgtgtctgtggcttttccaggtgcacagtgcaagttgttggatctactattctggggtctggacgacggtggccctcttcccacagctccactaagcagtgccccagcagaggctctgtgtgggggctccaaccccacatttcctttcttcacttctctagcaaagttctccatgaggactctgctcccttagcagacctcttcctggacatcctggtgtttccatacatcctctgaaatctaggtggaggttcccaaacctcagttcttgtctcctgtgcaccacagtcccaacaccacgtggaagttttgaaggcttggggcttgcaccctctgaagcaaacacttggccagctttagtcaaggctggagtggctgggaggcagggtaccaagtcccaaggctgcacatagcaggggatccctggagacattttccccattgtcttggtgattaacattctgctcctggttacttatgcaaatttctgcagctggcttgaatttctccccaggaattggggttttctcttgcatcttcaggctgcaaattttccaaacttttatgctctgcttcctcttgaatgctttgctgcttagaaatttcttctgccaaataccctaaatcatttgtatcaagttcaaagttccactgatcttttgggcaggggcaatatgccaccagtctcttggcatagcaacagtggcctttagtgcagttcccaacaagtttcccttctccatctgaaaccacctcagcctggacgttattgttcatatcactatcaacattttggccaaagccattcaacaagtctctaggaagttccaaactttcccacattttcctgttttcttctgagtcttccaaactgttccaacctctgcctgttactcagttccaaagtagcttccacatttttgggtatctttagagcagtgtcccactcccagtaccaatttactgtgttaatccattctcatgctgctaatgaagacgtacttgagactgggtaatttatagacaaaaagaggtttaatggactcatatttccacatggctggagaggcctcacaatcatggtggatggcaaagaagtagcaaaggcacgtcttatatagcagcaggcaagagagagcagcaggcaagcaagggaaacttccttttataaaaccatcagacctcatgagacttattcactatcagaagaacatcacgggaaaacccgtccccatgagtcaatcatctcccacagtgtccttcccacaacgtgtggggattatgggaaatacagtttgaaatgagaattgggtggagacacagccaaacaatatcactaggtatccatattttccagataaggaaactttaggctccaagctgagcttgcacttgcctgagcatctttagcacaacaaatgaatgacaaagctgggatttgaactcaggtatgtctgactcaaattagtcctttattctgacttcccagagtgtgcccctcagagccttggacctgagaaatagtgacgagtgctgtgatggaaaagaaaaagctgagaagccaaatagtccgcacagctgctgtcagccccctcccctcttgatgttattttaaaggcacataaacattctaaagaccctgagaagtcctgcaggtgagaaattggcttcctgtcatttaacccagtttctcccttgctatttacctgcagaatcccttttctccagaacttattctcttcctctgcctctcacactctctctctttctctctgcctcctactctttactatctctctctgtctccacattctgctgagagaggcatcatggggtagtgattaaaacagtaggctgtagaaccaaactttctgggtttgacaactgattctacctttagcctgctgcgtgacattgggagaagtctcaacccctctgtgtttcactttctccatccacaaaatgggggtgaaaacaattactacatcaaagggtgacaactaagtgaattactctattgaaagcacttcatgcctccttatcagtgctccccaagggtggaatgaggacccagagtacccgtattaggccatacttgtgttgctataaagactgtgccagattgcacaacacagcaggagacaggtcctggggtcaggaaagtccatggtggcatctttcctaggtcaggaaagtgtgggttgtactttgttggtcctctcctcgtgggttggggaagtatggggtgcagctgctcctggcagctttgactttcagcctcagataatgcattgcctgtgtctaatccacatggatgtggggtgactcagccacctccattccctgaatcagcatcttcagtggcggcaagtggtttgtttagctatgcaagcaagatgcagatttcccattttaaatgagaaaaaaagcagcaggcagagacagcagatgtggacacattcattcacatgttgggtgattagggactgacccctgccaggggcagggaggggacaggctcacagcagtgatggagacagacccaagcctaggggacatcaatcaaactggacccagtatctgtgcttctggatctcagattctagagaaacagagacacagaaggggatagaagagggtggggaagaggtagggggcaatgggaagagaggggggttgcattgatttgagatctttcttcttcttaaagaacgtttagttactgtaaagttcctctgtgagctatctgcaccccatgtttattgtagcatactcacacagccaatatatacaatcaacctaagtgtctatcaacagatgaatgaatggataaagaaaatgtgctatgcatgcatgtacacacacacacacacacacacacacacacacacaaatattatttagccttaagaaagaagaaaatcctgtcctttgcaacaccaggggtgaacctggaccatgttacattaagtgaaataagtcaggctcagaaagatatatactgcatgatctcacttttaagtggagtataaaaaagtttaactcacaaaagcaaagagtagaatgggggttaccaggagttggtggagagggtgaggagatgttgatcaaaggatacaaaatgtcagttaggaggaataagttcaggagatctattacataaatgggtgactatagttaataacaatggattgtgttaactatacattaattgaaaagcaattacttgaaatttgctaaatttgaaaattgctaagtggtttatgactcccacctgggggtgaagcaatgctccacagccactgaaagcaaccctgctctcctcaagagaccccgctgagcatctgctgaagacccgggcattagcccctcctgcctacctcagtcagtgcccacacacaattgaggggtctgaggacaggcccacctgatccagctccacccctctagtgcccaaacatgtcatacgggggactaggtatcatcctgctccatccaacacctttggcagctgagtatcaaagtaccaaagtactcggcacctgagtactcctcccagggaggaggtgggcccacccaacctgccgctaccaccatggctggcacccacctgcatgtgccaccagcaggcctggtgactggcctatccagcccattataccaccaaccacaaaagcatggaccattttggagctagaggattatcctgccacagctactgttcatgccatgtccaccacgcaggggcctgaggtcccacctaccagcccagcccaccattccactgtcagaacctgagaaagtcacctggaggcccaagaattggcccacctagatccactaacaccattgccagtgtatgctaccctcagacccaaggacaggcatactcaccatgctgctgccaccccttggcgcacctaatgtccccatctcagaacaactttaccacggcttccactaacaaccacaccctaagccaatggggaaatcacagacactactgacactgtttacagaggaagaaatcgtatgggaaccacactaatgcgtgcactcagagtcaaagtcaaagtgcccaacccaaccaacaccataggtacaacttcagggaaaatgtcctcccctatgaaagcagattcaaaaaattaaaagaagcaaccatgatcccaaatgcacagatatcaatgtaaagacacaagaaacatgcaaaagcaagaaaacatgacacccccaaaggaacacaataattctccagcaagagattctaaaaaaaattaatctaggccaggtgcggtatctaatacttgtaataccagcactttgggaggccaaggcaggtggatcacttgaggtcaggagttcgagaccaacatgcccaacatggtgaaaccccacctctactaaaaatacaaaattcgccaggagtggtggcacacacctgtaatcccagttacttgggaggctgaagcataagaattgcttgaacctgggaggtggagtttgcagtgagctgagatcgcaccactgcactccagcctaggctacagagggagactccatctcaaaaaaaaaaaaaaaaaagaagaagaggaagaagaaatccataaaatgccttaaaattcaaaagagtgatatttaaaaagctcagtgaaacacaagagaagtaaaaaaaatacaaaaatgtcagaaaattcagaatatgaatgagaaatttaccaaacagatcactatcatagaaaaaaagatccaaacaaattctggaactgaagaattcattgaattaaatacaaaacaaattcaaaagcttcaatgatacactagataaaaaaaaattaacaactacataacctgaagacaggtcttttgaaataactcagtccagaaaaaaataaaaaaataagaaacaataagcaaagcatatctgatatataaaacataagaaagcaaccaactattcaaattttgactatcccagaaggcaaaaaggaaacaaaagggatagaaaacctgtttaatgaaataatagctaaattcttctaaaatctatcaagagatttagatatctagatatacgaagttcagagacccctaggtagttacaatgcaaaatgttcttctccatggcacattgtattcagattgcttaaagtcaaagattaagagcaaattctaaaaacagtgagaaaaaagcatttagccatctataaaggagcccatcaacagtggatttgcaagcagaaaccttacaagccaggagaaaatgggatcatatattcattgagctgagttttcgctcgctctccaccactgctgaatgccgcctgcagacgtgccactgacttccacccgtccggatccagcatggtgtccactgatagaaaaaaactatctgcaagatactgtacccagaaaagttatactttgtaaatgaaaaggaaataaagtctttcccaaacaaataaaagctgagtaaatttatcatcactaaaccatacctacaagaaatgcttaaagggatcttacacatagaagcaaaaggaggatatctaccataaggaagcacacaaaatataaaacccattggtagagaaaacacacaaatgaggaagagaatagactcaaatggaagcacaacaacaacaaaaaacccaccaaactgttacaggagggtctttctttttagagctcccaagatggtgatgggccgctcccagatggggcaggccacttccaagatggcagcaagccttttgttctctgagctggggttcttggcctcatggattccaaggaattgaaccctgggccatgcagtgagtgttatagctctattagaagccatgggtcatggaagagaaccgtggaacccagtgactagtgttcagctcgattagaacaaacccaggcacttagccatggaagaacagtggtgagcctttagcctgattgggagcagcaatgggtgccttgctgggtcaggagtgcagcggacaccatgctggatctggaggggtggaagtcagtggcacatcggcaggcggcattcagcagtggtggacagcgagcaaaagctcagctcaagctggaacaaacatggaccagaagagtgtgcattggcaagatttaatagagtgaaaacagagctccaatacaaagagaggggacccaaagggggttgcccacccctggctccaatgcctggggtttatatcccaatcattgtccctctccctgtgctctcagatgatagatgatttgactatttctttacctcctacttttagcctaattggtattttagtgagccctctttactacctgattggtcaggtgtgagctgagttacaagacctttgtttaaaggtgggtgcagtcaccttccccagctaggcttaggaactcttagtcggcctaggaaatccagctagtcctgtctctcagtaccccctctcaacaggaaaacccaagtgctgttggggaggttggccaacaactgtactaacttctttctgctgaatgggggcataataggggtcatgcagttgagatttcctcaggagggatgtctttgatgtcatcaacattggagcatgggctaggaggcagatccaggggtctgccgtagatcttagccatggactgcacctggggctccgtttgaagaactatttgtagttttacagcttcaattctggaagagacaaacttaacaaggaggttaaagacacagggattgaaatgtctggcctgaagtgcaggggattatttctttggcacacttcacaggccctgactacctgcttgatagttttgaaaaggcctggtccagcaaataatgatttggccattggatgggtgctatcaacgcctaaatgaaaggtttggtgaagggttttaagtaatttccattggttagctgcaggcaaaagtatttttccttctttggtggctagacatcctgaggggagggaactatgtccttgtgaggtaccccattctatttcttctgctgagcactggggcttggtttcctggaggggattaccccatactagggttccttctataagcatttctaatggagggtcccgccttgtggctctttggcttcaatatctgcttggtggttcccttctatttccctttcctttcctttctgatgaccccagcagtgtaagatggccacctctttaggtttccgtacagcccataataactcataatggcttcctgatgtttaataggtgttccctcagaagttaggaattccatttctcaccatatttttgtgtaggcatggaggagaaggtaagcataattagagtgtttatatatatttacccttttcccttctcctaattctagtgtatcatggcccctgcttttgctaggatgtctctccctaacaaaggagtggggctttcaggcataattagaaaggcatgtgaaaagagtaaagtcccccagttacaacttagtggctgggcgaagtaactagtgactgcttgtcctaggacccctcggatagtaacagatctggaaatccagctagtcctgtctctcaaaactacaatgataaacaataagagaaaaagaaaggaagaaaggatatacatacataaagaagccaactaataatatgacaggattaagctctcacatatcaataataaccttgaattaaatggattaaactttccacttaaaagaaagagactggctgaatggatttaaaaagcatgacccagctatatgctgcctacaagaaacacatctcaccaggaaagacatatatagtgaaagtaaagaaatgagaaaagatattccatgcaaataaaaaccaaaagtgagcagcaatacctatgtttataaaggaaacagactttaagtcaaaaactgtaaaaagagacaaagaaggtcaatacataatgataaaaggatcaatcgagcaaaggatccatgaggaaattcctgcctaataaattttggtcagaccggttgtctgctctcaaaccttgtctcctgataagatgttatcaatgacaatgcttgcccgaaacttcattgcaattttaatttcaccccggtcctgtggtcctgtgatctcgccctgcctccatttgccttgttatatcttattaccttgtgaagcatgtgatctctgtgacctacaccctattcgtacactccctccccttttgaaaatcactaataaaaactttctggttttacggctcagggggcatcatggaacctgccgacatgtgatgtctcccccggacccccagctttaaaatttctctcttttgtgctctgtccctttatttctcaggctggccgacacttagggagaacagaaaagaacctacgtggaatattgggggtgaattttgcccgatatctggctgaatttcccctgataatgccactctctatgtccatgtgtacacattgtttagcacccacttatgaatgagaacatgtgatattcactttctgtgcctggcttgtttcacttaagataatcccctccagttgtatccatgttgctataaaagacattattttattcctttttatggctaaatagtattcaatggtgtatatataccacattttatttaaccattcatctgttgattccctatttttgctattgtaaatagcatttggaccacatttcaagtacttaattagtggccacatgcagcaagtgactatcacattggacaatgtagccccaacccactgtatgaccttgggtaagacttgcaaactgtcattgcttcaatatctccatctataaaatggggatggcaacaatacctcactaagagtgtaaagactgagttactgtgtgtaaagcacttcacgcctccccatcggtgcttcaccctggggctgcaatgagcacccaatcttagtgtcagatgacacagcacagcaagaccgaggcccttggttcaggaaagtccatgctgccacctcttcagggtcaggaaagtacagtttccacctcttacaaataggactgtttgtctgctcctcctgggtcaaagtaacttcgggttcaggtcctggatccagcaaagggtttgcttaacattgcaagaaagatgttgcctcatggtcaaaagtcaggcgtaggatgagacaggcagacacgcacacattcacacccacgttttgcaaagatggactgaccctgtcagaggatgtgtgggtgaaggtgcacagtgaggatagagacatatgggagtccagtagacatcaatcaaactggactcagtttgcacacacctggagctcaagagtctccagggggaaaacagagacacaaagtcagacagagagagagccagagaaatttcctgcaccgtgaagatagtcagaggcagggaagaaactccttagcactagttagagtgatcagaaaccaagaggacctgatcgctgtacctgccaggtctcagtttctgtctccttccaactgaccacctcttcctctgagactcaccagttctgcatctcttgctcctccttctgtttctccgaccacttccacctgtggctgtcacagaagggcggatgaaggaggggacactggagatagactcagcatctgcaggcttccaaagagaggggctaggagatccaccaacacaccagcacaaatacaccagcacacacagatacacacaattggttcatgtattgctaggttacagtttgctatgctacaaaggcagtaggccaaatttgattgaattgaataattccttattttcatcagcttctcctttttttttttttttttttttttttgagatggagtattgctgtgtcacccaggctggagtgcagtggtgtaatcttggctcactgcagcctccacctcccaggttcaagtgattctcttgcctcagcctcccgagtagctgggattaaaagtacccaccatcacgcccggttaatttttgtgtttttagtacagatggggttttgccatgtgggccaggatggtctcgaactcttgacctcaattgatctgcccccctcagcttcccaacgtgctgggattacaggtgtgagccaccgcacccagccagcctctcagttttgaacatgcactaccaccacctccacaacacacaaatgtaaatgcactttcgtatataaaactgtataaatacaaggaagctcatacacatgcaaggatacacacataagcacccccagattcaaccacagaaatatacgccagtacatttgcataaattcaaacacccctttacatgtaaaaatcatataagcacatacagggatgcaagcaggcatggacaaatgcatgcaagcacagacaaacagacaaagctaagtaaaaaagtgcaagctcacctatgcttacaaaaatagacatacatatacccacaaacccacacacccacacattcacttgctcacctggactttgatatctctaccactgtatccctgccaatatctacagagtgggtaaagggataggcatcaggtcactgggttgcccaagcaggaagtctgggttccctaacaactttttctaagctaatgctcctggatgatgatgaaaaaggaggtggggaatggatgaaattttataacagggtgcagaggcagggtcaggataaaaggcccagttggaggctgcagcagggtgcagggcagtcagaccaggaccatggaactcagcgtcctcctcttccttgcactcctcacaggactcttgctactcctggttcagcgccaccctaacacccatgaccgcctcccaccagggccccgccctctgccccttttgggaaaccttctgcagatggatagaagaggcctactcaaatcctttctgagggtaagacacagacgaatggggtctgagggtgagctgcttcttgccttggtacttggggaagcttcaccaaacagaatgaggcagacttccagagtcaggggtggcacgggcatggttggtgagtacggagcatggtgaagcatgatgggtggtattattaggagaaaagcatcaaattaaatttagcagagtttatttgagcaaagaagtgactcatgagttggacagctccctaaaccaggaaagacaccacacggcagtatggtcaagtggtatttacaggcagaaaaaggaggtgacatacagaaacagcctgattggccacagatcacagcttgccttacttggtcacaatctgagcagtttgcagcctgtgtggactgaaagcccagctgctctgattagccaacacttggctacttgtcacaagaatatattcatttgggccaggtgcagtggctcatgcctgtaatcccagtgcttttggaggccgaggtggtggatcacctgaggtcaggagttcgagaccagcctggccaacatggtgaaaccttgtctctactaaaaatacaaatattagctgggcatagtgatgcgtgcctgtaatctcagctacccaggaggctgaggaaggagaatcacttgaatccaggaggcagaggttgcagtgagccaaaatcttaccactgcactccatcctgggtgacagagtgagactccttctcaaaaaaaaaaaaaaaaaaaagaatatactcccaagttaggttgcagttcactctacagagagagctttaggtcaaatttaatttaattaaacaattctccccttttggtcagcctcaaaattttgagattgaccaaaaccttgggcatcaacattacttctgtcaccatcataatggacttgtctgctctcagtatggaattcacaatggacaatgtcaacgtagttgagtgattctttaccttttcttcatgtttttgttgttcccactgtaatgagcccactggatgtacaaagaatggctgcatatgagcatttaagactctttttttttctgagacagggcctcactctgtcagccaggctgaagtgctgtggcatgatcacgtctcactgcagccttgacctcccaaggctcaagtgatcctcctgcctcagccccccaagtagctggaactacaggtgcatgccaccacgcccagctaatttttgtattttttgtagagacagggttttgccatgttgcccagactggtcttaaactcctgggctcaagcaatccacctgcctcggcctcccaaagtgctaggattacatgtgtgagccaccgcacccggccaagactcttgagaaaatacaacacatcagggagactgttatgatggctctcaggagggtaatacgaagaaaatgaagtcactgggcctgtaataaactttgaggaatgtggacttgggggtatagataaggtccactgtccacagagagaagaaaggctgttaatagtctcttttaacttgagtgtgtccatgaaccaaactgatcaaaatcgaataattcgaagttcagacaataaagatagttcaatagtattagagtccaattggtcatagattttgttcagggcatgatggtaattaaggaccagagcttgctataaaataacttgatttatagagacattcatttgtagttggcctggtaacatatagtatcctggagacccactagaagaaacattaagagtagaaaagtttgggatagccaggcttgctgtgttagtccattctcacactgttataaagacatacctgagactgggtaatttataaacaaaagggatgtaactgactcacagttccacatggctggggaggccccaggaaaatacaattcatggcaaaaggtgaatgagaagcaggaaacttacaatcatgatggaaggtgaaggagaagcaagtaccttcttcacaaggtggcaggaaaaagagagagagccaagggggaagagcctcttataaaaccatcagatcttgtgagaactcactcactatcacaagaacagcatgggggaaaccgcccccaggatccagttacctcctactaggtccttccctccacacctggggattacaattcaagatgagatttgggtgaggacacagagccaaaccatatcacttaccatcaccattcaggatgcttgcaaaccaactgctagctgcacctgtaaacacatatctgtttctttcccctgagaaatgtccttagtgtatttgtggcagtgtctagagaaacagcagtgtcagccgcattttaaattaagttatctgcactagtgaattcactggaaagataagagcaatatttggttttcttcagcaccatacacaagcctccaagatgggcatagaggagatctaaaattgcgtgatgttccattaagcgtttttgttgccacaaatgttctcatctcagtttggagagtggcttctacccatctgaactccttggaggttcaattagctgcaaaattcaagatgtcccttaatgtataacttagcctcagattccatacaactgtcacccaaataccaccaagaatgagcacccaggaacccaactggaaccttttctgaacagaaaccaacttatcttcgtcgattttgaggttgatagtaatttcagttattgactgttttggcttttaactatgggaggtattaggaaactctcagggaaacaatttggaaagcagcagtgagctaggccaaatagcaagttctggacctgtgaggagaaagaacagagtaagcaaacctcaagatactcaaggtaggcactcgtggtgttggaaaagagggtcacctactggcattagagcagagatcagttagatttgtttacccataagtctgcatagctcctgaacaaggtgggaaacttacttttttgtggtctttttctagcatgctgcgaaggtgcataaccacatttagttggaaagagactttactgtatttacttatttatttgtttttaatagagttggggtcgtgctatgttgaactcttggcctcaagcaatcctcccatctcaatctcccaaagtgctgggattacaagcatgagccaccatgcctggccactttacatatttaatccagtaacattacacacgcaattgcccacacccccataggtagtccccaggtcttgcatacgggatgcctggaagcaaaatatgccttttgcagccattattcagatacatttcctatatttagtagtgattatgttattagctagttaatagtatgttattacgtactgttattatattaactaactaataacataatcactactaaatatttccagtgagtgcaaaaaagcaagtggcaatgatgtctagaatatcaagatatagctttccactcctcctttggggtttctgggtgattctcattgggaacatgaagaggcattggcaccagtgaaattatttcctgattttggggcgttggttcagaaactcaacaactccttgttttttttgtttgtttgcttgttttgctagagtataagcctttgctaaagccattcacagattatagtcctatggattttcttgtaaggaaagggaaagggttaggacagcaagaaatggggaagaaaggataaaagataatgctttcatgatggaagagaaatcttgatccacaatcttggaaaagctgtccgcatataagatgccaactgcttctggggaaaaacttccctggtcagctttgccttaaggtctccaacagacatacagttctaggagtctagaagggtcctttccaatggagagatgtggatccaagatccgagaccctgacattttgctacagagaagaacttggcattgtccttcccaatggagtacaaggaacagtcttagaagaacttggtacggtctcttccaatggagttcaaggacagtttgtctggtgtcatttccaaagggcccaacctctaaattctagatcatgaaaggtctggttgtcatcaaccgatgtgtcatcaatgactcattttacctggtgaaaacatgctttggcataaagtattatagccttgcattattgagtcatatcagagtttataagagtgggagatacatgagattctattattaggggcataggccctctattactattttacaagagatctatctatgtctttccagtaggagtggatctgattgccatcaatcaataatacctgagaccaagggactccaatcaattcagcatgctttgcctaatgatatttgtttgtaatactgttgcgggacaatcaaagactggagagaccaaaaaaggttcaggagagtttattaaattaaggtgatcaccggttcagccagacatacatccagaaagtctgagccccgaacaaaggcttttcctacttttaaacatattaaggtgggaactacatgaggcaggaagccagtttcagaagtgagaaacaaagcagttaaataacatttcttacatcttgagaaagacatgtcttgcaacctaaccttatcggtccggtgaccctgcagctgtgcaggaactcactgggcctgtaataaactttgagggatgtggagttggggagtataggtaaggtccactgtccacagagagaagacaggctgttaatattctcttttaacttgaatgtaaggtgtggtcatactttgcagcaaccttaagaggattttaaaatttatattactactactattaggttatagttgatttcattaattccttcttcaataccttatttaactgttttaccacttgtctagtgaaacaagtacctctgtcactggagagttctccaggaatgcccagtaaggaaatacattttctaataaccttttatctacggttatggcattgattgatctttgtgcatagaaatgctttaatacaaccagaaaacatgcaatgaagctggcagttgaattaactccagcttcaagtgttcaaatgatctaccaagtgccagaaatatatcacctgaggtttttgttgtcttactagaattatggatttgataaaccaaatattagttataaaccatttagtaatcttagaatagtcacctcatcaatattttttcactgtttggatcattttctctcttctatgatgagtcatggaatacggagcttttagtaatggaaattttaagaactcaggaaggaccaggcggccatctagggtctccatgagtgcatgcttcacattggaattacagactctaaagtacaaattttaatacaatgagttgcaatttatgcttctctaattcaggtacataacactggtttattaaataggttatcataggtaatttgatggtgccattgcactccagcctgggtaacagattgagaccctgtctctgaattggaactgcacgggggcactgtccttggaggggtgaatgggcatgaagaggtgtctgggtatgagccacaggtatagaatttcactcttctctgccatcctctgttacatcctgggtacctgcctgccactgaaagaatgaggtaaaagaggtggtggcacgaatcaaatagatcttgctgtgccaatgagagagagcagactagcccatgtcagtgccaggagagtggaggagagagggagagcaggagaggagtgtgggtagggagtgctcatcaacagtacacatagtgccctataccggtaactgccactggctcagtatttacctgggttatcactgcttaccatgcctgattttatgattaattatctacttatcattactaatccatcaacccactttccaatgggagaattagaacactgacaataccttccagctcctcttccccttccccctcccatgttgaccatactcctgaatcttaggctcgttatccttttactattaatagagttatttttttaatttctgatcaatggtctttttaatgataccaagtacagagtatatatgccaatactactatgaatttttaaattatttgctcagacagaatacatggacatacaaatgatgaatgtgataattgtcatacatatatatttatcttagacacttagtcaaaacatgtggtctttggttatcagttagacactgtcactttacctggaagatacaaggtaattggtcacagactctcaaattatgaaacatttagatttttcaggggaatgacatggagggagccaaggagtcttatgattagataagatgttgtttgggtggctcacgacaccactgggcaacactcaaagaggtggtggcttatacctgtaatcccaacactttgggaggctgaggtgggaggatcgcttgaagccaggagttagaaaccagcctgggcaaccaaacaagacctggctctacaaaaaagttttaaaaatttagccaggcatggtggcatgtgcctgtagtcccagctacttgggagactgaggcaggaggatgacttgagccttgtagtttgaggctgcagtgagctatgatcacgtcactgccctccagcctgggcacagagcaagaccctgtctcttaaaaaaaaatcatctgcaatgtgaggagtgataacatttaggaacgtgtgtataggtttaaatgctggtcaaagacatcctacacaattcgctgaaccttctctctaagggttttttcccaagctctgcagacgctatctgggcacaaatcatgcctctgttaacagaatttgctgttccttctagctcttggtatcccactgcccgctttctttatgaaagctggtatggtcattgaatatcccaatcctttacaaatttggaaacaagcaaaactgtcaatgaaatttgtatttgcctaaaatgagttttctttctttcttttttattattattatactttaagttttagggtacatgtgcacattgtgcaggttagttacatacgtatacatgtgccatgctggtgcgctgcacccactaactcgtcatctagcattaggtatatctcccaatgctatccctcccccctccccccaccccacaacagtccccagagtgtgatgtttcccttcctgtgtccatgtgatctcattgttcaattcccacctatgagtgagaatatgtggtgtttggtttttttgttcttgcgatagtttactgagaatgatgatttccaatttcatccatgtccctacaaaggacatgaactcatcattttttatggctgcatagtattccatggtgtatatgtgccacattttcttaatccagtctatcattgttggacatttgggttggttccaagtctttgctattgtgaataatgccgcaataaacatacatgtgcatgtgtctttatagcagcatgatttatagtcctttgggtatatacccagtaatgggatggctgggtcaaatggtatttctagttctagatccctgaggaatcgccacactgacttccacaatggttgaactagtttacagtcccaccaacagtgtaaaagtgttcctatttctccacatcttctccagcacctgttgtttcctgactttttaatgattgccattctaactggtgtgagatggtatctcattgtggttttgatttgcatttctctgatggccattgatgttgagcattttttcatgtgttttttggctgcataaatgtcttcttttgaaaagtgtctgttcatgtctttcgcccactttttgatggggttgtttttttcttgtaaatttgtttgagttcattgtagattctggatattagccctttgtcagatgagtaggttgcgaaaattttctcccattttgtaggttgcctgttcactctgatggtagtttcttttgctgtgcagaagctctttagtttaattagatcccatttgtcaattttgtcttttgttgccattggttttggttttttagacatgaagtccttgcccatgcctatgtcctgaatggtaatgcctaggttttcttctagggtttttatggttttaggtctaacgtttaagtctttaatccatcttgaattgattttgtatactaaaatgagttttcaaaaggatctttgtggctaccttattagttcatagaaagtggaggcttgtctggaatgatattaaagaatttttttcattttaattgttttagagacagggtctcagtctgttacccaggctggagtacaatggcacagtcatagctcactgcagccttgaactcctgtgctcaggagattctcccaccttagcctccagagtagctgggactaaaagtgtgagccaccatgccccactatttatttttgtagagatgtgtttgggggacggtctcactatgttgcctaggctggtctcgaactcctggactcaagcaatcctcctgcctcaacctcccaaagcattgggataagttttgcatagacatgtttgaccctctcccttcctttattgcagcaaagatttccattttctcacagggaggacttggggcaaattgtttttgtcgttgttattgttatttgaggatgtgggtgggtcatcttggttaatgtcagtgcaagaacggtgtctgctcctcattattggggttccttagctattcaggcaggcagcagctcccttgagaagacttcctgacccccaggtccccatcatatgctctcatacaccagctgcccctccttactgagcctatgtccttgatagtgctgcatttacctgtgatcctgtggctgagctctccctcacacttccagacaaggaaggcctgtgaggtatcagcacagtgctgaacatagtacctggtacacaataggcatttagtaaatatgtgaacaggaacaaatgaaggagtcagtgagtgaaagctccaagcctgactcagcggaactggcagtcggccagggcctacaaagtgctgcctggccctcagtagggggtggcagatctggggatccctcttcaccaaatagagttgcatcatacaggtaaaggtcccaagtgcctattgttttcttttcatcattttccatgtgtgacaagagtatcacgcaatcatgtgaatcaatggacttagttttctcactagactaatgtgtctaggaattatctgtgttgtcatggggattttccaggtgtcatttacaactacctgtggacaagatgaggtgctaccctcatcttagaattagggatggtggctgggcatggcagcccatgcctataatctcagcactttgggaggctgaagcaggtggatcaactgaggtcgggagttcgagaccaacctgaccaacatggagaaaccctgtctgtactaaaaaacacaaaactagctgggcatggtggcacatgtctgtaatcccagctactcgggaggctgaggcaggagaattgcttgaacccaggaggcggagtttgccctgagctgagattgcatcattgcactccatcatgggcaacaaaagtgaaactccatctcaaaaaaaacccaaacagaaacaaacaaacaaacaaaattagtgatagtgatgctcagcctggggaaagcatttgtccagtggcacacaactgggaaaaggggaagctgagatccagcaggaggtctgtctccaaagccctcctagactaaagctgcttaacaatttgtggattatgaaattctcatagagtttgattaaagctgtggccccctcttttccaaataggcacatacatgtttgcataaagttgtgaggcttcacacactccctaaaactctttcataaaccttccaaggatcctctaggtattcacgaccatctattatgattgcatctcttgggggtggggtaaagagggagggcatgagcaagtgtgcatcagggctgaggaaggtggcgctgttgcttctccatttcccaataagcttccagattctttttgatgtcagagggatgtgggctcgtgtctcagattcaacccgtatgcattgagtcacagttttctcttccgtcagttaagatcatgacaatgagaatgtgtgcccctaaggtggttgtgaggattaaatgggatattgcatacagctagtatataataagtgctcattaaatggcaactaccttgatccactcattcatttattcacgaatccaataacaattcactgggcactttctatgtaccaggaaatagtctaggaattgatgatgtggcatcttggacaagacatacgaggtcactgcgcttatggacattccattggcagagacagataagcaaaaaataaacagataaggaaatgttaggtggagaagagctacaattaaactaaagcagggggatatttcagacagtgatgagaactacgttagattgagtggttaggggaagactgtcttgtttttttttctgagcagagacaatgaaagattcaggtggaaggcactagaaggaggcaggggtggctacaagaatcctgaaacaggaaaaatgtcagagaacaacatggaggaatgagtgggaggagaagtcagagcggtaatagggccacgtcatgtaggaccatgtgaaccctcagtggagacttcagatcttattctcagcaaagtgggaatattgtaggccttggtgagcacgtggatattaattattttacattttagtggggttaccctggcttgtggggcagtgaaacaattgttaagtggagtaagcatgtcatccagaagtccagtgaaggggctttgcagagatcaatgcagggcatttgtaagtaaacttaacaaattttatgacttttatgtcaagtttttattgaacttgaacatcactgtaaaaagcgcacagctcaatgaattttcacaaactgaacatactcatgtaattgacatgcaggccaagtagcaagaatgccccgaaaccctgcaccctgttcttttctattcactatccacctaccatcttgatcatgggttgattttatctgtgtatgaacttcttttttgtttttgtttgtttgttcctgagattgaattttgctctgtcgcccaggctggagtgcagtggcactatctcgcctcactgcaacctccgcctccccgggctcaagcaattctctcgtctcagcctcccgagtagctgggactacaggtgagagccaccatgcctggctaatttttgtatttttagtagagatgggttttcaccatgttggtcaggctggactcaaactcctgacctcgtgatcagcctgcctcagcctcccaaattgctgggattacagatgtgagtcaccacgcctggccctgtgtttgaacttcatacacataaaattatgatgcattgactcttttgtgcctagttgcttccactcaacattatgcctgtgagtttcagccacgttgtcgcctgtagctgtggtttgttcttttttgttgctgtatactagtctattgtgagaaccctcactgattgtctatatctatattgatgagcattttattaagaaagcttctgtgaatattttgttcattttttggtgaacacacatacacatttttgctgggcatgtacctgggagtgaagtggctggtttcctgggtatccatttgttcagcttcaggaaatactgcccagcagttccccaagtggctgcacagtaatcccaccttatccactggagatatcttctgagacccccagtggatgcctgaaaccccacataatactgagcactatgcatactctttttttttcctatacaatcacattatatagggagggtggtatacacagtgcagacatggtggacaaaggatgattcgtgtccggggtgggacagagtggatggtgagagatatcatcatcctactcagaatgatgcacaacttaaaacttacgaattctttatttctggaattttccatttaatattttcagactgcgattagctgcaggtaactgaaactgcaaaaagcaaaaccacagatcataagaagtatgcggtgggggtgatattcatcgtattttatcaaccatctttactgtttagggcacaagccaatcagagcagaccctggctgggccacccattaacctaagcttgtccaacctgccttattttgttgttgttctgttttgttttgttttagctttttagcagcctgaagccatggttttcagtttctgtctccagtgatacacagaaaggaaggatgaggaaggggctttactggcccaaccagaaacggaaactaagaacccatgactgtattctctcccttggacagcgttaaccattaacccttaattgctgggtcccagcaggggaaagggcagcctggggaggcggatgttggggaggggctaattaccaatctggtatgtaagtattttgatagttttacaaatgaggtgtatgctgactaacagccacccctggtgtggatgtgattggcagttccgagagaaatatggggacgtcttcacggtacacctgggaccgaggcccgtggtcatgctgtgtggagtagaggccatacgggaggcccttgtggacaaggctgaggccttctctggccggggaaaaatcgccatggtcgacccattcttccggggatatggtgagagcctcagaggcactgggagggggcgggtggggggtgcatcagggaagggagtatatgggaggaagaaggactcagagccttcttccaacttcttctacaaccaacccacacctcccctgcaccccaggtgtgatctttgccaatggaaaccgctggaaggtgcttcggcgattctctgtgaccactatgagggacttcgggatgggaaagcggagtgtggaggagcggattcaggaggaggctcagtgtctgatagaggagcttcggaaatccaagggtgagtcctgggggatgaataggaaagaaagacaatgaaacactgagagatgcaggtgcacgggaatagaaagacagagaggtatataagggcacagacagagacagacgaaactggagacaccatcagacagagggatagagacagagagggagagagacaggggaatagagagggatggggatgggcaggagagaaacacagagagccagggaaagagagagatgccaggtgtataatgtccaagagttactcaaagaggctggatgtgatgactctcacctgtaatcccagtactttgggaagctcaggcaggaggattgcttgaggccaagagttggagaacagcctgggcaacataatgagatcctgtctctacacaatatagaaaagaagtgagccacgcatggtggtgtgtgcctgtagtcccagctactcaggaggctaaggtgggactacaggatcacttgagcccaggaggttgaggttgcagtgagctgtgattgtaccactgcactccagcctggacaacagagcaagatcctgtctcaaacaaacaaacaaaccctcaaagacatataatttcatggatcaattgtgtctgtcaaagtcaaaaacggaagttaagtaaaagaaaaaaactacagacatttaacaaataatgaactgtgttttccttgccctgggtgaagtgctgatgagctggcagtgagcagacaggccaggtggggtgttctgcccgggtgcagctggaggggtcatcaaagaatcactaggttatttttgagttctccataacttggtgtctgtgagacatgtaggtgaagggtctctggctagcacctccatctcattcatgccaggtgtttaccatctctcttatcaaaatttctcaagagactctgggatgtaaatgcagaggctgcatggggaggtagagacccaggagctatagggaaacggggacaagaagactgaagagaaggacaggaagaaacagtgacacaggcaggaggaaagagacagatggagggaccaaaacaaaaaaatataggttgggtatggggctcatgcctgtaatcccagcactttgggaggctgaggctggcggatcatttgaggccagcagttcaaaaccagcctggccaacatggtgaaaccccatctgtgctaaaaatacaaaaattagccaggcttggtagcacgtgcctttaatcccagctactcaggaggctgagacaggagaattgattgagcctgggaaatggaggttgccgtgagctaagatcacactactgcactccagtctgcatgatagagtgagactctgtctccaaaaataataataataataataaaataaagaacggcaggggggagacaaatatacacacagagagacagaaagaaacaaaggcaaagagaaattgaggcagagaaaattagagagacagacagacaaagcttaggaaaaggtctgcagaggaatgagagaagacaggcaagtgagaaccagagagaggctgcactaacctgatgttcttgggtccttacagaccactctccctccagctggggccagtgctgagcctggtgtatacaggtatcacttaacaagtacagaataattcccagaagactggagagccctagatgtggaaagaagagattaagggggagtaataggtaggggtggaaagatggttttttatttgttttaaattagagacggggtctcactctgtacccaggctggagtgcagtggcacgatcatagctcactgcagcctcaaactcctgggcccatgtgatcctcccacttcagcccctggactatttcaactgggactacaggcatgtgccaccatgtctagctacatttttttttttttttttttgtagagacagggtctccttatgttgcccaggctggtcttgaattcctgatccttttgaatcaggctcccgaagtgctgggtttagaggtatgggcccctgtgcccacccagggctttttaatttatataagcaattgattgaacacctactctgcccagcccctatccctgggatttaactgtactcactcccagagtcagaggtggggcctgagaggaggtgcagagtgagaaccggctgcatggactctatagctgtgttgcctgggtctaaatcctggcctcagtaatgagtagctgtgcaactttggtcaaattactcagcctctcggtctgcccatctataaactggagctaataatcaaattgcatctgcctcacattgttgtagtgagagttcaatggaattacgcgtgacgtgctggtacataattagctgttacggttattctcatgtttaccattactgagtgatggcagacaatcacacagagataggtgacagcctgatgttccccaggcacttcagtctgtgtccttgacctgctgcttcttcctaggggccctcatggaccccaccttcctcttccagtccattaccgccaacatcatctgctccatcgtctttggaaaacgattccactaccaagatcaagagttcctgaagatgctgaacttgttctaccagactttttcactcatcagctctgtattcggccaggtcagggagacggagagggacagggggtgtgggggtgaggtgaacacccagaacacacgagaaaaggatgacctgtcttgggggctcagaaatgcagcttatccttggaagaaacgcagacatgtgaagaatcagggacatggagacctggagggaggagagacggtgagacagggatagagacactgagagagagaatgaggcgtgatggggaggcagaaatagagtcagagagagactgagagaaggaagatgagcaaaaacaagacaaagaagagcagaaatcaagagattctgagagacagagttgatgagaatgagtgtgaaagagagggagagagagagaacgaataaggctttgggcttcatgtctattctgctcctggatgtcatttctgttttattttttttagacggagtctcgctgtttcattccagctggggtgtagtgttgccatcttggcttactgcaacctccacctcccgggttcaagtgattctcctgcctcagcctcccaagtagctgggactgcaggcatgtgccaccacacctggctaatttttttttttttcttttcgagacagagcctcgctctgttgcctaggctggagtgcagtggcacaatctcagctcactgcaacttccacctccctggttcaagcaattcccctgcctcagcctcctgtagctgggattacaggcgcctgccgctatgccaggctaatgtttttgtatttttagtagagacggggtttcgccatgttggccaggctggtctctaactcctgacctcaagtgatctgcccgcctcagactcctaaagtgctggaattacaggtgtgagccaccatgcccagactgcttctggttcttctgtatccttgcttctcagtctttggtaaagctctccacctaaagaaaatgaaggataaatgacaataaggaacagcatttcttcattttctcccatttctccttctccctctgtgtttttttttttaactttccccagattgtaaaggcagtcttctgctcttttaaaacaaaatactaaaatgtctccttatttattaacctggaaatatgcctattacatattaaatttaagaatatcaagctgcagaacagtatgcatagctgtagtttgttgttgttgttgttttcagacagtatcttgctctgttactcaggctggagtgcagtagtgtgatctcaactccctgccacctccacctcccaggttcaagcaattctcatggctcagcctcccgagcagccgggactataggcgagcgccaccacacccagctaatttttttgtatttttagtagagatggtgtttcaccatgtcggccaggctggtcaacatagctacagctattaagcagggatgtatgttggattcacatgtggggttgtcacagttatggattttcaggaccctactttctgggcggtctgatctggaaagtctgggatggggcccaaggtgagtacttgtaacaagcccgaccagtaattctaatgttctcctcccaccgagaaccacagagaaaagtctggaaggagacccaccagacagttaacaatggttatctctagaaggagagattaagaaggaaatttacatctgactatatatgtttgcatttttgcaattatttgcaataaattaggcattccattcttcatcaaagtaatagaaataacctccaaaatacgtagtcctaacatgtcagcaggcttatcttgtgtaagaatcattttattaatatctgacacagcaagggagatgaggagaggtgggaagagggagagaaaagtatgagaaagacaaataaacaggctgaggtagacaatgggtgacacagaaaggaagtgagacagagactaagagagatagaaaggagagaggcagggagatggggcagaggccaagaaaaagacagaaggatgagggaggaagatgcagaaagaggtaaatgtgagatagatcaaaggagatatagagtcagtgagtgaggggttcagaggcagaggggagtggggaagtggggttcccatggagggattggggcccaggaggcgctctctccctgtgacctgctagctcagccctaggcaaacctcaccaccccttctttcttgcagctgtttgagctcttctctggcttcttgaaatactttcctggggcacacaggcaagtttacaaaaacctgcaggaaatcaatgcttacattggccacagtgtggagaagcaccgtgaaaccctggaccccagcgcccccaaggacctcatcgacacctacctgctccacatggaaaaagtggggtctgggagaggaaaaagggaagggaggggagggagggcaagatggagaggtgagaagagggagggaaaaggggtagggaaggggaagatggggagggaagaagaaagactagggaggggagaatagggaaagggaggagagaacatgaggaaggaaagaaagatgaggtgaaaggagggagaaaatagggaggaggaactgagacagggagagaggggaggtgggaagacagaatgaaagacagagggagagagagagaagactggctgaggaaggaattcggggcaagggacaaaaatacagcaacaagagaaaaaactcacagaggcagaaagagacggggacaaaaagagagaaacacatcaaagagatgtggagagagatagaaacagagttaggaagactaaagagaggctgagagagatgagttagagatacgcggttggatgtgtagaggacagagaaaagcaaactgggccagatagtgtcaaagacctttaggccaacggagggcagccagggagatgggcgtatacacagcaaggctacagcctcccctgaccctccccttccttccctactgtggacgcaggagaaatccaacgcacacagtgaattcagccaccagaacctcaacctcaacacgctctcgctcttctttgctggcactgagaccaccagcaccactctccgctacggcttcctgctcatgctcaaataccctcatgttgcaggtgggccagggacagccagtcaagggggtcttctgacctccttctgagctgcagaaatggggctatgggtaccacctggatgagagaggggatgctggcttcctattctgggagcactgtaggctctgggctagattccaaccaagccaattctgttggtggatgcatggatgcatgaagaatctgtccatgcgttctcccactgttttcttccatcacttaaggattttttgttctaaggtttttgtttgtttgtttgttttttgttttttggtttttttttttttgtcttttttgagacagagtctcgctctgtcacccaggctggagtgcagtggcatgctcttggcttactgcaagcttcacttccagggttcacgccattctcctgcctcagcttcccgagtagctggaactacaggcgcctgccaccacacccggctaattttttgtgtttttagtagagatggggtttaaccatgttagccaggatggtctcgatctcctgacctcatgatgtacaaatttagggggtacatatgcagttttgttacatgcgtaggttttgtaatggtcaagtttgggctgttagggtatttatcacccaaacagtgtacattgtacccattaagtaatttctcatcattcaccccccttctgctccctcactcttctgagtcttcactgtgtatcattcctctctctgtgtccatgtgtacacattttgtagcactcactcatgagtgagaacatgcaatatttgactttctgtgccatcacttaaaaatcgatccatccacttatcatttcatctattcattctttaattcattaattaaagaatgtataattactgattctttcatttatgattcatctaaggacatatactgtcattcatttatttggattacttgatccacaagttgatcctttgaaacagtggtatgttgatggactatttgtcattgattcattggctcattcattcattcattcatgcattcatccatccttctacgaactaggtttcactcttatccttccatgagtcaacctttcaattcacccttaatccatccgtgatttccttcatttatcacaataattcactcatttattcacctctgatctacttatcattcaatccagcctttcatttactcctttatttactcatacttcactaatttaattattcacttgctcttccataaatctagccattcatgtgattattcattaattgggttcattgatttctttgtctatggatcattcattagtgattaattaatcaatccatctattaattgataagtaaatacagacatccatttattggtttgttcatttattcatcaatctttccatccatgaattgatctattgattgattgattgatgtttttatccagttgttcatgaattcatctattgttctattacactgttatatacctgaggaccaagaatagtgtctcaactatattataaacacaataaatattagttcattttctactcatcttagagagggtgttttgagaggtttgtagcctggagttcttaatctgaaattccatgcaaaatcgtggtgtgtgtgtgcatgtgtgtgtgtgtacctgggcatgtgggaagaggatctgtaatattcattagatttcaagcagtgagaattcttgttgcttcctccctcctcccctcaccccatgctgattactttgaggggtatcaaggatctaaccctttactataggtttttcattggtcaatagaaagtagtgtccttgctgaaaggtctctttttaaaaaaatttttttttcttttgagatggagtcttgctctgtcacccagtctagagtgcagtggcatgatctcggctcactgcaacctccacctcctgggttcaagtgattctcctgcctcagcctcctgagtagctaggaatacaggtgtgcaccagcacacccagctaattttttgtatttttaggagagacgggattttgccatgttggccaggctcatcttgaactcctgacctcaaggaatccacccacctcaacctccaaaattgctgggattacaggcatgagccaccatgcctggcctgaaatgcctctttaaaatgagattcattggtcttcttttctgtacagagagagtctacagggagattgaacaggtgattggcccacatcgccctccagagcttcatgaccgagccaaaatgccatacacagaggcagtcatctatgagattcagagattttccgaccttctccccatgggtgtgccccacattgtcacccaacacaccagcttccgagggtacatcatccccaaggtaagaccggctggaaccccatagccctcctgtttgggcatcctggattctcttaatccccgaactcaaccttttgttagctccttaattgagtcccgttgtttttgttttttgtatttcttttttgtggagtgtgtggagggttggagggaatggcaatatcttttgatcttgtgatcctccctcaggacacagaagtatttctcatcctgagcactgctctccatgacccacactactttgaaaaaccagacgccttcaatcctgaccactttctggatgccaatggggcactgaaaaagactgaagcttttatccccttctccttaggtaagctggacccacaatttctttcccagacaccagagggcaggtactatccccaacttgagaaaaacaacgagagatactgattatttgagcacttaatatattctgattgcttcacctgccttatcccattccatcttcactacaaccctataaggaggcttgagaaagaagattacattcccaaaggcacatcttggcaagcaggaccttgggcaagtattttaacatctctaaacctcagtgagttcattttcttaaaaagaaaaaatctgttgggcaccactgtaagcccagtgctgtactgggggctgaagataatgcatcaaacaagtcacacagagacagggttcctgccccaggaaatttaaagtccagcagggaagatgggcattcatcaaataataataaaataatcatctcatgaaatgaatgaatgcctgcaacatgcttagaactgcctggcacaaaggacatgctcacaagggcaattattattataattagacataattgtgataagtgctctaaagggagctttgggagcacaaaataggaaatagtagctaatcttgtggtgggtccgtaaggaaaagcttaccagaggaactggcttccaagctaacatgttcatgggtgagcatcaatcaaccattgcaaagtgtgttccaggcaaaggaaacagcaaggacaaaggccaaaggtagaaacgtgatatggcaccattgagaacctataggaagtccagtgagccttgggtgtagattgcagaaggaaataagacaaagggctcatctgggcaggaccttgaaggttgcaggaggagtttggatttatggtctagcactgggaaggtggaaaaggtcttgacgtgctctgacttgtcccagttctcatcctctactctttggctggttaaaagaaaaactttagacaaattaaacttagcagagtctatctgaacaaagaaacaattcatgaattgggcagcacaaggaaccagtaaaggttcagagagctccatccagcaatgtggtcaggcactatttatccacagggaaaggaactgaggtactgaaacagcctgattggttacagctctgtgtttgccttatctgagcatgtctgggcagcttgtagcctgtgactggctgaagcttggctgccctgattgtccaaggttacttgttacaagaatatactctcaagtttgtttacatgttgagttacattacaatttgttatgtagggaggctgctttaggccaaatttaattgaatttaacatgcaccatccatgaaaggccccagaaacaaacccccagtcttgagtttcatcagtgacttcagtgatccagggtttggcccagcccccggttttgcgcagtacagtgacctccttccacattttatcttcaatgaaaattgggaacatgtgtggtgatggcttgaatgtcaatgtcttctctcaattttgctatctgaagtttctttttttttttttgtcttcagacggagtcttcctgtgttgcccaggctggagtgcagtgtcacgatcacagctcactgcaacctctgcctcccaggttcaagtgattctcctgcctcagcctcccgagtacctgaaactacgggcgcatgccaccatgcctggctatttttttttatttttagtagagactgggtttcaccgtgttagccaggatggtgctgatcttctgaccttgtgatatgcccacctcagtttctgaaagtcctgggattacaggcataagccactgcgactggcctgctaatttgttttaagagaggcagagatgtagggaaataaggacagagacagataagtaacaaagataatgagactgagaaacagagttagggacaaagagggaacacatagagatagagatggggagccagtggcagaaagacagagggcaaacctcagacagtatacagagaggaagagagagagacacagagagagagagagtcacgtaaggagaaggaggaggaggaggaataagaggagagagagtaggaaaaggaaggaggaggggagaaaggagggaaaggagagaaacagaataagagataggaaaaagagagagtgacataaaaagagaggaagaaagaatgaacaagacaaataaggtatctttagagggagatgaaaagaaagaatgagagagaaagagattggggagaaatcagattcaaatagatggagataggaagttaagcaagatggaagaaagccaaaaaaaggagaggaaaagaagaaaagctgtgtctgacaggtatagacagagaaaaagacaggagtagggctgccaggggcagaaagaaaggtataacccaagccaaaagggtactgcagccaaagaaattcgaaaggtgtccaaacagacggccccagagatggggagggcgtgatgagagggagataataagcctcaggctgttgtgaaaaatgttaggtcacacaaagagttacagaagaacaggcccagagacctgcctgtttctaagctcatgtcacccaccttctgggtatgccaaagggatgtggacacttttccaaacacctccacatagacacacttgtccaacaacttgacaggcatagggaatgcctgaaaactcacacttgacatggcctttccaaggtttgcagattatgaaacactgaagtgaagggaaaggctccctttgtctctgcctgagctttttccagcaccctttgttcttatttttctcccaatctgtggtttagaatctactgggggttccttgcacctctgagaatcagtggaagccatagaccctccctgtctcatacgcatcagtcccattcacaatttatatacaattgggcttttccccccttgagctcttgaagcctgtggatctcaggctgagactagaagacagcctagagacacagacacagacacatggccagaaacacataccccacacataccccagaaacaaacacaaggcagtaaccaaaccttaagcctccttagcacaagccaagtgctattctaagaatttttacaattgtctcctttaacctcacaagagccctttgagggaggtgccattctccccatatgagaagtgaagaacactaagaatgttgtcataaatgtgctcacactcacacatgtacaggtacacacacacacacacacacacagaaccagaaatgggtcattatactctgtgggtttcaccaaccctttggaactgtaacagaagctagaaactctcttatataaaaatgaacatggcgccgggtgcagtggctcatgcctgtaatcccactttgggaggccaaggcaggtggattatctgaggtcaggagctcgaggctagcctggccaatatgatgataccccatgtctactaaaaatagaagaaattagccaggcgtggtggcaggtgcctgtaatcccagctacttggtaggctgaggcacaagaatcatttgaaccacctgggaggtggaggttgcagtgagccaagatggtgccactgtgctccagtctgggtgacaaagagagactccatctcaaaaaaaaaaaaaaaaaaaaaaaaaaaaaaaaaaagagagagagagaaatgaacgtggcacatccactcaaagatttgcatctggtttcagagcagcttcctaaaagtccaccctgaattgtaggttaaaggccagtcttatgcaaatctgttgcagtggacatttgtgtctgggcttagggacatggcagagcgaagtgtatgcacctgccctgtgcccacactggtgaccttctgtgtccacagggaagcggatttgtcttggtgaaggcatcgcccgtgcggaattgttcctcttcttcaccaccatcctccagaacttctccatggccagccccgtggccccagaagacatcgatctgacaccccaggagtgtggtgtgggcaaaatacccccaacataccagatccgcttcctgccccgctgaaggggctgagggaagggggtcaaaggattccagggtcattcagtgtccccgcctctgtagacaatggctctgactccccgcaacttcctgcctctgagagacctgctacaagccagcttccttcccctccatggcaccagttgtctgaggtcacattgcaagtgagtgcaggagtgagattatcgaaaattataatatacaaaatcatatatatatatatgttcttgttttttgagacagagtctcacactgttgcccaggctggagtgcagtggcgtgatctcggctcactgcaacctccacccccggggatcaagcaactctcctgcctcagcctccctagtagctgggattacaggcatgcactaccacgcttggctaatttttgtatttttagtagagatggggtttcactgtgtaggccaggctggtctcgaactcctgaactcaagtgattcacccaccttagcctcccaaagtgctgggattacaggcgtgagtcaccgtgcccagccatgtatatatataattttaaaaattaagctgaaattcacataacataaaattagctgttttaaagtgtaaaatttagtggcgtgtggttcattcacaaagctgtacaaccaccaccatctagttccaaacattttctttttttctgagatggagtctcactctgtcacccaggttcgagttcagtggtgccatctctgtccactgcaacctccacatcctgggttcaagtgattctcctgcctcagcctctggaggagctggtatcacaggcgtcccccaccacgcctggctaaattttgtatttttaggtggtcttgaactcctgatgtcaggtgattctcctagctccaaatgttttcattatctctcccccaacaaaacccatacctatcaagctgtcactccccataccccattctctttttcatctcggcccctgtcaatctggtttttgtcactatggacttaccaattctgaatatttcccataaacagaatcatacaatatttgattttttttttttttttgaaactaagccttgctctgtctcccaggctggagtgctatggtgcaatttttgttcactgcaacctctgccttccaagatcaagagattctccagtctcagctcccaagtagctgggattacaggcatgtactaccatgcctggctaattttcttgtagttttagtagggacatgttggccaggctggtggtgagctcctggcctcaggtgatccacccacctcagtgttccaaagtgctgatattacaggcataatatgtgatcttttgtgtctggttgctttcatgttgaatgctatttttgaggttcatgcctgttgtagaccacagtcacacactgctgtagtcttccccagtcctcattcccagctgcctcttcctactgcttccgtctatcaaaaagcccccttggcccaggttccctgagctgtgggattctgcactggtgctttggattccctgatatgttccttcaaatctgctgagaattaaataaacatctctaaagcctgacctccccacgtcaagaggtgatctgtgccattttgtgtgtgattcttttattgtcgggtctctagggatttttctggaaggaatgttggtgagaatgcctctctcacctcaatgccaactctgtgaagggccaaaccattgtcttgctcatccctgtactctcaacacagcgtgtggcatatgacaggtgttcaaaatatttggtgaggaatgaatgaatgagtggctaaatcagccaccccctacccccacagcccacccaaaatggagctaggcctcctccatcagactatatctcctccatatcccactttcttgtgaggtccagaataaattctcatccccaaagggcccaggatgcccccattctgcctaccagttactctcgataccccgtgctgcaatgccaccttttgataaagcttagcgctattcttgcagtggaaccactctaaatccagcctccaggctggacgcggtggctcatgcctataatcccagcactttgggaggccgacgcgggtggatcacttcaagtcaggggttcgagaccagcctgaccaacatacaaaaaccgtgtttcaactaaaaaagatacaacaattacccgggcatggtggtgtgcatctgtagtcccatctactcgggaggctgagacagggtgatcgcttgaatgcaggagggagaggttgcagtgagccaagttcccgccactgcactccagcctgggtgacaaagtgagactccgtttcataaataaataaataaataaatccagcctccaaacattccaccagcaggaccaccacccttccctgagggaggtgctgcaagtttaatatcattatcacaaggatacatcagccagcctgtggccagtgggaagctggccctgggactccaccctgagatgctaaccttttggcgtctgcagcatctgccatctttgggctccttgtagcctctgaagagttaacagagactctgccagtacaaatgcatggcacacattccctcaccaaccacagaaataacaaacagagcaacatgtcttttaagagcgacagcagaatggaaggcgggaagaatgaggaccacggtgccctcagccttctcactcctcattgtccccagtggcctcttgctactctggttctggggccatcccacctcccagggctgcctctctcctaggccctggcctctgcccttcctgggggagcattttgcaaataaaccacagggctttctgaagtctgtccaggtggtgagatgggagagtgtggaagggatggaaaaggaggaggtgggtagacgggaaacagctcacaggcagcaaggcagttggggtcgtactttgggtgggattccacagacaagcttgggaattcctttctggcttatatattaactacagaagcttctggaattttataaggtgaaatggagaggagacagactggagggtgaaattctgatagacttgaggctttgagatgtggtcctggggtggagcaagacaagaaaagtactggagattggggtttgaggagtctatgcaattatttttatttttaaaaatctttgtggctacatagcaggtgtatatatttatgtggtaagtgagatatttcgatacagacatacaatgtataatcacaggcatacaatgtagacaggcataaagtgtatagtcacatataataataacatcatggtaaatggggtaaccatcacctcaagcactcatcatttctttgtgttacattagagttatattccctctgttatgctaaaatgtaccacaggctgggcacagtggttcatgcctataatcccagtattttgggaggctgaggcagacagattgcctgagctgaggagttcgaaaccaccctgggcaacatggtgaaaccctgtctctacaaaaatacaaaaaaaaattagccaggcatggtggcatgcatctgtaatcccagctactctggaggctgaagcgggagaattgcttgagcctggtaggtggagtttgcagtaagccaagattgtgccactgcagtcccgcttgggtgacagagtgagactccatctcaaaaaaataaacaagcaaacaaacaaaagtacaatgaattattgctgacggccatcaccttattgtgctatcaaaaactagatcttattcattgtatcgaactctatttttgtacccattagccatccccagtccctcacctccacccttcccagtctctggtaaccatcattctactctatctccatgagttaaattgtcataatttttagctcccacgaatgagtgagaatgtgcaaagtttgcctttccgtgcctggcttatttcacctaacataatgtcctgcagttccatccatgttgctgcaaatagcaggatatcattcttttttaatggttgaatagtactcccttctgtatgggcaccatatgaacacttaggttgattccataacttggctcttgcaaacagagctgcaaaatacactggagtgcagatatctcttcagtatacggatttccttttttttgatatagatttagcggtgggattgctggattgtgtggtagctctatttttagtggttttctttctttttgtttgtttattttatttctttattcattttttttgagatggagtcttactctgtcacccaggctggagtgcagtggtatgatctcagctcactgcagcctccacctcctgggttcaagcgattctcctgcctcagcatcctgagtagctgggactacaggcacctgccgacacgcttggatgatttttgtaattttagtagagatggagtttcaccacgttggccaggctggtcttgaactcctgacctcagatgactcgcccacctcagcctcccaaagtgctgggattacaggcatgagccaccgcacctggcctattctacttttttttttctttttcttagggaaactccatgttgttcctcaaagtggctctattaatttacattaccaccaacagtgtacaagggttccatggggattacttcagattgagtggtcagagagggctcctttgagaagacttctgagaattggccatgggaaggtgtggggagaagccttctcagctgagggaacagcaaggtcaaagacccagaggtaagaaagcaagcttggaaccttccaggagcaacaaggcattggctctgataatgccttctcctgctaaaatgacagctctaggaaggcagggttcttatttcctgtctatctatctatctatctatctatctatctatctatctatctatcatctatctatctatcatatatctatctatccgtctgtctttatttatttatagaggcagagtcttgctctattgtccattgtattagtccattttcatgctgctgataaagacataccgtagactgggtaatttataaagaaaaaaagtttaataaactcacagttccacatggctgcggaggcctcacaatcatgctgaaaggcaaaagttgcgtcttacatggtggctggcaagagagagaatgagaaccaagagaacggggtttccccttataaaaccaacagatctcatgagacttattcactactatgagaacagtatgggggaaaccacccctatgattcaatgatcacccaccgggtccctcccacaacacgtggggattatgggagctgcaattctagatgagatttgggtggggacacagccaaaccatatcaccaaggctggagtgcagtggtatgatcatggctcattgcagcctccaacttctgggttcaagcaatcctcccacctcagcctcctgattagtggtgactacaggtgtgtgacaccacctctggctggcttttaaattttttggagagatggagtcttgctattttgcccaggctggtctcaaactcttggtctcaaatgatcttcccatcttgacttcccaaagcactgagattacaggtgtgagccattgcacctggctggttctcatttatttaagtattactgctgtcatggtttgctttggtccctgtgggttcccccaccctttgaaacaagtgcctgacacatggtagggttcacaataaatatttgtagaataaataagagctgagccttcaaggggtccaaaatacttgcacggagtttttctaggtgggcacgatgccacccagctgcaggactatttcagggtgttcattggctcctctggttgatcttttgatgcctgtataagaactcccacttctccaaatctgggggccacatctttagagttctcagctttctgtctctcaggaatgaaggagataatatcactgattggagccagattgtctggatgttgaatcccagctccttgctggtgcctttgagaagtgactttagccctccatgtgccttatttctgcctctgtaaacggagatcatcatagcacctctcatgtggggctgtttgacgattcggtgaggtatgtgcaaagagctttttgcacttgcaaaaagtgtctgggatatcattgtgtgctgtaagaatgagctgtaatgattatcactgagacttgttgttgggattaaaagagatcaggtctgtcagggcctggtacacaagaggtactagaaaaataatgggaggtttaggtgctccttcctccagatacactcgtaaatatgactgctgtgtcgtcatctactttttagggatatgaagaatctgctgtgtgaccttagatgaataaatctctgattcactctgggccttggttttccctgcctctgaaaggggtatgatgtttccttcccttttgcctgggcgcaggtactgggtgctttgtagttaagggagtatcagctggtggctcaagggtagattctaacaggaacttccaagctggagaaatactaggctacacctcagagaggggaggtgggtaagggaggcccctgctggtgtgagcaggaggtgggtgagggaggcccctgctggtgtgagctcgatcctttatccctgagcttcagactctcttaagccttcccacatgagaaactgacatccagatggaggtggggaccctgcaatgtaaagccaggtcacctgtccacagaggtgtgtctgataaccagggcatgataggttagagagtgtggtggctaaaagcaccagcccttggatcacctgaggtcaggagttcaagacctgcctggccaacatggtgaaactccatctctactaaacatacaaaaattagcttggtgtggtggtgggcacctgtaatcccagctacttgggaggccgaagcaggagaatcacttgaacccaggaggcagaggttgcagtgagctgagattgcgccatttcactccagcctgggtgacaaaagcgaaactctgtctcaaaaaaagcaccagccttagactcagagagaccaggatttgagcttgggggacctcagcttcctctctgtgtgacctcaggtaagccacttatactctttgggcctcagtttcctcatttgtaaaattgaggccgtgattgaacctccttcaagagctgttgtgagtgctataggggatactatcttaaagcacttaatgcagtgcctggcacatggtagttctgtagaagtgcttgctattttaattcacgtgcacaggtcctgcctgtgggtgagggctcagtagatggaacagcgatggttgatatagttgggattgtgaggattattatgacaggggctaatttgaatgggcctgtgttgtctgccctccccactgccagcctgatttccctctgcctggctttgcagctcctcccattggctgctggggtgtaccccttgcatgcggatgagaaacgagtcaatgaagtcccgtggggaattgggatccagcgtgcactggttgtgctccactttcttggcaatgaagtcctccagcccttgcagctccttaaaggcctgttgctgtggtcctggcaggtgtttcatcaccgaagagaacatctcatagagctggggttgcagagagaggatgggaagggaaggaccgctgtcaggaggcaggaactgatgggaatgggacctgtgtcagagcaagaaaggcactgggttaaaggcacctacctgcccaggtgtttaggtatttcagtggggctggatgggaacatatatgtaagtcttcatgagggttaagtgagaaggctactgtccagaaatttaggtaacatggactgaggcacacatccaggtttcaatgaaggtggattggagcgcacagctaggtgttcagacattcaaggcaggatgtgttggaaaacacctgttcaactgtttagctactcagacggggctggtatgaggggagtgtcacctgtctaggtatgtaggcattcaggtgggcctggttgaagacaactaccgagatacttattgggtctggattgggggcttttgttcagatgttcaggtattaaagtggggctggtgaagatgttgaagaggaggggatacctgttgaggtgtttacctatccaagtgggatgcactgggggcacctctgtaaggtgtgtgattggaaagggttggggaacacttatttgggtgtctggggaataatctgtctagatatttatgtgtttagggtattggttagggcacctgtccatgttttcaggtatttaagtgggtgaagtagagggcgcttggccagatattccagtgggctaatctgggacatttgtgtagatgtgaaatgattatgatgggctggattttgcagcaccaggtgttcaggtatgcaggaggcgggttgaggcagtcacttgtccaggtgttaaaatattcagaagaactgggtagggagcatctgttagaaattatggtaagttggggatgggaacatgtgcccaggtgagagagctgagctgagggtatgcatcctgccttcaggctctgttttggggatcatctgttgagctatccaggtgtccttggagactgggtattgggcacccatcctgggttctggtgcaactttccggttgtccaatattgggggctgattttgaggggacactgtctggaggggggtgggagtttggggcacctgtccccatgtaggggagcagttggcaggttgtggtaggggcgtgacagccaggctgcagccggttacctgccccgtggagggtgccgtgaactggaagctttccagcatcatgcacagcagtgacaggaacttttgtcctcatagtcaaagcggtccccaaagacaatggagctgatgacattggaggtggtacggcttaggaagaaggtgggatagatgctggagcttgcgggtgtggcggtgtattgggggagaagggggttgggaagagagtcaactcagagctctgatgctagtctgagaattccaggaggcactgccctgatgagccacattcccagcgccagactacagggctgggagcgcgggcgcctttccccaccaaggcccggtccccagacagaacgcgcgcgggttcctcgccctgggcgttttccttctcccgcctccacactcggggtgttctgctcaccgcgcgtgccctagacggccttgatgaggaagcccgccttctcctggatacctccttgatgccgcgcttgcccaccccgaagtcccgcagggtggcgatggagaagcgcctgagcggcttggtgcgctcccaggtgcggcaggtcactcctgggagaggaacgcaggggtggggagaggtcaggccgtgggaacaggcacagaagcctcgcgcaggagaactgcaaactcagtcagagaaacacagagagaaacagagaccgaacaggaacaagaggatcagaaaagagacaggccagacagacagatgcacagcagaacagagggagacgggacactccatggagcatagggagggaaggagggagagaaaaagacagagatgggagaagatgatggaagggggggaagtgaggtatggggagatctgcgaggagaaaataaaaatggtgaaagagtcttttttgtttgtatgtttgtttatttgtttttgagacggattctcgctctgtcgcccaggctgaagtgcattgtcgccatcttggccgctcgctgcaacctccaccttccaggttcaagcgtaaaaatggtgaaagactcctaagctgagctggtgaagacagaaaactacggaaagagaaacagagacggtcgggaaggaggagagactgttatcaggagaggaggctggagatgtggaagtaggaataccgcgaaatcctaagacagaggaagaagaaggagaggtcagtggacagaggagaaactcagagaagcacagaagctgagaaggacaaaaagacaaatgaagacagagaaccagggttggaaaacagaaacccaggattgtcctcagagatggggaaagaggagactccagtgagagaggcagggagaaatctggacagggacagggacagggatgctggagacaggcaagagggagaggccgcaatgaagggagctggggagcgaaggccagacagggggctctgccgcagccttcagtgggcaggagagtcagggagaaggctggggacacggaggccatcgagtcggcctggccaccttccccctcttgggcaccccctcaccatagcctttgaagagccagtcgaaggtggcctgctcgcctcgcccgctgaactcctcagcctggtccaccagagcctccttgacggcatcatgtccgcacagcaccacgacccgccggggccccaggtgaatggtgaacacggggccatagcgctcactgatctgatggaggcaggtgggagtggttagagggagcagcccccactctgaatgggcgcagcaccgagatatcatgtactgggatgttttgcccccaggttctcacagtcagggagctggacatcccaagatcctgtctttccagcctaggaccctgatgctgaaactccaaaactccctttcctaagactctggtccacactggtcaatcccctgccacaaagcctcagccaactgggcagcccccaccccgtgccacccatctccctgccttgggacaccttcatgatggagtcacatatgtgctctgtgttcagctgcaggtagtttccaataaagagcaatggggtgggtcccaaaggcagcttccccctgctcttcctctgctgccagactgacatcaagaccatcacagtcaggctggccagcaaggccaccagaagcagccctgaggccagcatggtggcagtggaatgatagatggtgacggctggggtggtttgcctttatactgcctgaaaaaaaggggtggactttggctggttataaaatcacctcatttcacctcccaactacatcctctccgtgaaccccacctagctttggacacaaccagcaaaggaggaggagggggaccccagggaagctgaacagagagggtacctcccgactaaatctgtggtacctcaggaggggtgccccagggctgtggatttaggagcgggcaacagataagctgtagaacaaaggagttgggaatatttgcataggggagcacttgggctttggatttgggatctgggagtgagaatgcaccccaaaattgtggatttgggggttccgaggagaagaatgcaaaggtctgggttttattagggtgagatggaagtgtggctgtgcatctgggggtcttctgttgtggaggatgcagggttaagggtctcaggaggggggattccaggcatatggacttgagagtcttggggctaggaagacccagggctgtgggtgtggagtttctgggaggaggagtgtgtagcaagcccagtaggtcgtcccagaaagcccagcagcccagcactgggcccaggggctgacttgattttgcttttgcccagagctgtctcttgatgcccggaatcctcactggaacctcagagtgaggccaggatgggtgccatggaaactccactgaccatctctggttggcaaaggggtggaagaccagagccatatttcaagggaaatttccacacacctggagaagagtaccttgtgttatcagttggcagagggattggccaggtctggagaaatagtaacaacaacccccaaatggtggaaaaagctcaagtgtcccaagggttgtaatttacaaagacctccactggtttccaacccagatccttagggaaacccactagattgattgtatcatccctattaatattatgattgttgtttatctttctcattttatataagggtctacagaggacagaaaacagacagtaggcaggggacatgcatgagtggccctgaactcccatctctcctgctctgagtacttagttcccctttctggatttggttttcccaccagtagaaagggagtatttaggaaaagatcatatttgagggtgagttaagtctcctttaagggcgattcctgctttgtcaggggctactactattagcaggcagagggaacaatcgcagaagagattggggtaaactccagtgttaggcacagaggtagatcctggggtgggtgtgagtggagaagggatgagtagccctcctgtccttccctcagggaaattcttccttagtaaacggggcagttaccctttggtgagcatggtcgtatatgggaagattaagtctaggtgtgtatgatctggtcgaatctttgtaacagtgaggtttgttcatcatgatcatcctcattttgaagatgagcagatctagactccataaatcctcttgagtgaggtcacacagggaataagtgagggagctgggatgtgaactttcttctcatcccccgtcattgactggcctagatcaccctgggagtcaagtgcaggccaggcttagcaggaggtgagtgctgagactggcatcagcagtggacacactgatgacattggcgggttctgatatcagcatcaggtgtgttcagggagggaaaggcatcgtgttggctttgggactgcccccaggtgtatgcgaggatgggaaacaagttggtactgaacttgataccaggagaatattgaagtcatgtttggtgccaagagggctctgtgtgttgtttcaggtttcattgagggcataagtgtgtcctgcttcaggagggcgtaagaatggcaccatatagggtctgaggttggtcccagtgggctgtgacatgagcatgaggcaggtgctgatattggtcctatgtgggtctgagatgagcctcagccagatcctgagaggggccccagatggccacaggacaggctctgatggttggtccttccagggttgcacctctcctctaggtcaccaaatttggacaagtggatgtgggtgaggttgacactcccaggactggctctaactggctcaaattggctgttgagctctgagacctgtgtggaggaatcaaagagcagagaacaaagcagagagaggaaagctgtttattgattttgtgggggaagaggtgggaaggaggattagcaccagctgggcagacatcaatccatctaatcctggtcaccagcctgcacttgggctggccacaagcctgggtccttcctcttctcccttgtttcttaaaaaggagagaggtagaaatttggagagtttgtttctcagtgagtttggcactaggaagggcactgagtgttcagacaggctgccatgacctggccagggtgggggtggggagagtcaggttgggagaactctagtatttggggacatagagttcaagcaattttggccttgttgattactctgaagtgtggagtaagagaacggtgtctgaaattaagtgggagggacttgtcccagtggcggtgcgggtacaggctttcagagtgagttagtggtgaacccaggaaaatccctttccattgctgggcctctgtttgcctttctggatggatggtacagtggttaagagcaaggttaaggcatggattggaatccaaaccttatcccgtctttgttgtgtgaccttgaacagctgacttcgtctctctgaaccttatggagccaaaaacagctcctagctcttcagctatttaggtgagaagtatatgggtcaaagcaggggaggtacatgtaagtgctcaatgaatattagctgtttttattcatctgtatgttgaagagaatggacgagatgttctctaagccccctcctggcttttacaattctctgctctaacgttatcaaaacttttcctttgagaagggggaagggagacagagttttttgggaacctctctccacatcccttccttagcatagccaagccttacccatgaagctgtgaataggaaattgaacttaggctgcctcctagagcatggcgctgagttaagcagtatccgcaggaagaaaggccagtgttaggccctcagattactctggatgggcctggagccctgcacaggactttgctcacctgtctctctcccgttttctctgatcttgtctttctgtcttcctctttctcgttccctgcaagtcaaccttacccttaactgccctgtgtgctcctgcaactttgcaactttgcatgattttgtccagtggtttctcctagatgcctctgccatgtttatccttatttatacgtctgtctgtgtgtgtgtcagtctgagtgcatgtttgaggttcctgtgtgcatgtatgtttcagcatgtccctgttgacagatgaatttatgcatgcaccaggctttgtggagtgtgtgtttgtgcttgataagtgggcatccattccaacttatgtctacacatgcacatctttgtgagtacctgatgaggtgcatgtgtgttcctgccacctttcctgaatgtttgccagtctctgtctgtctgtgcatgtagcctgagtgcatgctttgtgttatgccacttggggggtacctatgacgtgcatttctttgtccaacctgatgtatggctgcatgttcacatttgtgtggattcatgcacaactgggtgactacatataagtgtttggatgttttatgcatacattttggtgtctgtatgcaggcatgtgggccctgttgtgtacacatgaacatgtggtatttgcctgtacctctctgtgtctggattcaaaaatatccctagcccagatccatttctcttctaaaaaaaaaaaccatgtgaagctttttatgagcatgatcttaattacacgctgcactgtaagcctgtgaggttggttttatcatcttcattttgcaaatgagttggataaggctcccaaaattggaagtcccttgctttgggttctacaatgaatgagggtagagctggagtacggccttgtgtgactgtcaagtccatgctgtcaaccaccaccctggactgccaagccccacctgttttctttatgaaacatcagaaaattgcccctaatctcctgtggttcttgaaaaacttccctgtaagcacataacaaaagattccaaaatgtcagggggaaaaaaagtcttttaataggagggagacttcaacttctagtttttgcattctttggaagattaaccaaagatacggtcagctggtatacccctcaggccattggcagtgagacagtgcaggagttgggaaactagatgttgtgggcggagagtgaaatgtctgtgtttcatatttcagagtgatgacaaggataaaggtgggcctgtggaagtattggctgaaatagagtgaagaaggtcaaagaagagaggaaagtcaagattctttcttcctgagtgtttggatagctcacattcctggccataaagggcttccctaccagtagaatgtcagggcttagagtagagaggtaggaaagaagttgggtagatgacagggatgaacaactttttaaatcacagggcgaaggtgtcagtatccaagtgtctggagagtttcttctggtaatgtttgagtagcttctattggatcaagcatcctgtgaataacagctattaactctgaagaaaacatttttaagaacccagttctctgaaattactggagagtgaacgaaagcagcagatactgaagggggttggatgaagcaggtttcctattttgggtgttttttttaatgctttcggcctaaaggcagaccctggaaagtgccttgtggggtggcttaatcccagatagagatgttttaatttttttgacttcaagaaccagaggacagaattcaaggtgattatagcatctactgatagtggtggtagaattgcaaaaaggaaagagccagagagggggagccccaaattctgtaaataaactctgtccaaatttctgaccaattgttgaactacttatttgctggagaactccaggtaccctgctaaggctaaaggaacttaattgagatttcagagctgagggtttgagattagccaggttaactgctttccaaattaaacaaacaaccaaaatcagtatttttcaacagaacataatggaatccatggtctctccaacttatcacttgtaatatccaggatgaaatctcaaattactaggtatatgaagatacaagaaatgggggagagtctagccaagatggccaattaggaaaagctccagtctacagctcccagtgtgagtgacgcagaagacgaatgatttctgcatttccaactgaggtaccaggttcatctcatggggcattgtcagacagtgggtgcaggacagtgggtgcagtgcacagagcgtgagccaaagcagggcaaggcatcgcctcacccaggaagtgcaaggggtcagggaattccctttcctagccaaagaaaatgggtgacagatggcacctggaaaatcgggtcacttccaccctaatactgcacttttctaacggtcttagcaaatggcacaccaggggatcagatcccgtgactggctcagagggtcctatgcccacagagccttgctgattgctagcacagcagtctaagaccaaactgcaagacagcagtgaggctgggggaggggcgcctgccattgctgaggcttgagtaggtaaacaaagtggccaggaagctcgaactgggtggagcccaccgcagctcaaggaggcctgcctgcctctgtagactccaccctctaggggcagggcatagccaaacaaaaggcagcagaaaactctgcagacttaaatgtccctgtctgacagctttggagagagtagtggttctcccagcacgcagctggagatctgagaacagacagactgcctcctcaagtgggtccctgacccctgagtagcctaactggaaggcatcccccagtaaggggcagattgacacctcacacagccgggtactcctctgagataaaacttccagaagaatgatcaggcagcaacatttgctgttcaccaatattcactgttctgcagcctccgctgctgatacccaggcaaacagggtgtggagtggacctccagcaaactccaacagacctgcaactgagggtcctgactgttagaaggaaaactaacaaacagaaaggacatccacaccaaaaccccatctgtacatcaccatcatcaaagaccaaaggtagataaaactgcaaagatggggaaaaaacagagcagaaaaacttaaaattctaaaaataagaacgcctctcctcctccaaaggaatgcagctcctcaccagcaatggaacaaagctggatggagaatgactttgttgagttgagagaagaaggcttcagacaatcaaacttctccgagctaaaagaggaagtttgaacccaaggcaaagaagttaaaaaccttgaaaaaagattagacaaatagctaactagagtaaccaatgcagagaagtccttaaaggacctgatggagatgaaaaccacagcaagagatctatgtgacaaatgcacaagtctcagtagtcgatttgatcaactggaagaaaaggtatcagtgatggaagatcaaatgaatgaaataaagggagaagagaagattagagaaaaagaataaaaagaaatgaacaaagcctccaagaaataagggactatgtgaaaagaccaaatctatgtctgattggtgtacttgaaactgacagggagaatggaaccaagttggaaaacactctgcaggatattatccaggagaacttccccaatctagcaaggcaggccaacattcaaattcaggaaatacagagaatgccacaaagatactccttgagaagagcaactccaagacacataattgtcagattcaccaaagttgaaatgaaggaaaaaatgttaagggcagcaagagagaaaggttgggttacccacaaagggaagcccatcagagtaacagctgatctctcagcagaaactctacaagccagaagagagtggggccaatattcaacattgttaaagaaaagaattttcaacccagaatttcatatccagccaaactaagcatcaggagtgaaggagaaataaaatactttacagacaagcaaaagctgagagattttgtcaccaccaggcctgccttacaagagctcctgaaggaagcactaaacatggaaaggaacaaccagtaccagccaccgcaaaaccatgccaaattgtaaagaccatcgatgctaggaagaaactgcatcaagtaacaggcaaaataaccagctaacatcataatgacaggatcaaattcacacataacactattaacatgaaatgtaaatgggctaaatgctccaattaaaagacacagactggcaaattggagagtcaagagccatcagtgtgctatattcagggacccatctcatgtggagacaaacataggctcaaaataaagggatggaggaagatctaccaagcaaatggaggttgcaagcaaatgcaggggttgcaatcttagtctctgagaaaacagactttaaaccaacaaagatcataagagacaaagaaggccattacataatggtaaagggatcaattcaacaagaagagctaacgatcctaaatatatatgcaaccaatataggagcatccagattcataaagcaagtccttagagacctacaaagagacttagattcccacacaataataatgggagactttaacaccccactgtcaatattagacagaacaatgagacagaaggtcaagaaggatatccaggacctgaactctgctctgcaccaagcagacctaatagacatctacagaattctccaccccaaatcaacagaatatacattcttctcagcaccacatcacacttattctaaaattgaccacataattggaagtaaagcactcctcagcaaatgtaaaagaacagaaatcacaacaaactgtctctcagtcaacagtgcaatcaaattagaactcaggagtaagaaactcactcaaaaccacacaactacatggaaactgaacaacctgctcctgaatgactactgggcaaataacgaaatgaaggcagaaataaagatgttctttgaaaccaacgagaagaaagacacaatataccagaatctctgggacacatttacagcagtgaaggggtggcctgcccctccacacctgtgggtatttctagtcgggttgggacgagagactaagaaaagaaataagacacagagacaaagtatagagaaacaacagtgggcccaggggactggtgctcagcataccaaggacctgcaccggcactggtctctgagttccctcagtttttattgattattatcttcattatttcagcaaaaaggaatgtagtaggagggcagggtgataataaggagaaggtcagcaacaaacatgtgagcaatagaatctatgtcataattaagttcaagggaaggtactatgactggacatgcgtgtaagacagatttatgtttctctccacccaaacatttcagtggagtaaagaatgacaaggcagcattgctgcaaacatgtctcgcctcccaccatagggcggtttttctctcatctcagaattgaacaaatgtacaatcgggttttataccaagacattcagttcccaggggcaggcaggagacagtggccttcctctatctcagctgcaagaggctttcctcttactaatccacctcagcacagaccctttacgggtgtcaggctgggagacggtcaggtctttctcatcccatgaggccatatttcagactatcacatggagagaaaccttggacaatacccagctttcaagggcagaggtccctgtggctttctgcagtgcattgtgcccctggtttattgagactagagaatggtgatgacttttaccaagtatactgcttgtaaacattttgttaacaaggcacgtcctgcacagccctagatcccttaaaccttgatttcatacaacacatgtttttgtgagctccaggttgagtcaaagtggctggggcaaagtggctggggcaaagctacaaattactaacatctcagcaaagcaattgtttaaagtacaggtctttttcaaaatggagtctcttatgtctttcttttctacatagacacagtaacagtctgatctctctttcttttccctacacagcagtgtgtagagggaaattcatagcactcaatgcccacaagagaaagcaggaaagatctaaaatcaatatcctaacatcacaattaaaagaactagataagcaagagcaaacagattcaaaagctagcagaaggcaagaagtaactaagatcagagcagaactgaaggaaatagagaccaaaaaaaaaaaacatcaaaaaatcaatgaatccaggaggtggttttttgaaaagatcaacaaaatagatagactgctagcaaaactaataagaataaaaactggaagaagaaaagctgaagaatcaaatagatgcaataaaaaatggtaaaggggatatcactaccaatcccacagaaatacaatctaccatcagagaatacacctctatgcaaataaactagaaaatctagaaaaaatggataaattcttggactcatacaccctccaaagactaaaccaggaagaagttgaatctctgaatagacaaataacaggctctgaaattgaggcaataattaatagcctaccaaccaaaaaaagtccaggaccagatggattcacagccgaattctaccagaggtatgaaaaggagctagtatcatttcttctgaaattattccaatcaataaaaaaagaaagaatcctccccaactcattttatgaggccagcatcatcctgatacctaagcctggcagagacacacacaaaaagaaaattttagatcaatatccctcatgaacatcgatgcaaaaatcctcaataaaatactggcaaactgaatgcggcagcacatcaaaaagcttacccaccaagatcaatttggcttcatccctgggatgcaaggctggttcaacataggcaaatcaataaacgtaatccatcacataaacagaaccaaagacaaaaaccacatgattatctcaatagatgcagaaaaggcctttgacaaaattcaacagcccttcatgctaaaaactctcaataaattaggtattgatggaacgtatctcaaaataataacagctatttatgacaaacccacagccaatatcatactgaatgggcaaaaactggaagcattccctttgaaaactggcacaagacaaggattccctctctcaccactcctattcaacatagtgttggaagttctggccagggcaatcaggcaagagaaagaaataaagtgtattcaattaggaaaagatgaaatcaaattgtccctctttgcagatgatatgattgcatatttagaaaaccccaacatctcagcccaaaatctccttaagctgataagcaacttcagcaaagtttcagcatacaaaatcaatgtgcaaaaatcacaagcattcctgtacaccaataacagacaaacagggagccaaatcatgagtgagctcccattcataattgctacaaagagaataaaatacctaagaaggagaaataagaacacttttaaactgttggtgggagtgtaaactagttcaaccattgtggaagacagtgtggcaattcctcaaggatctagagctagaaataccacttgactcagcaatcccattactgggtatatacccaaaggattatatatcatgctactataaagacacaagcacacttatgtttattgcagcactattgacaatagcaaagacttagaaccaacccaaatgtccatcaatgatagactagattaagaaaatgtggcatgtatacaccatggaatactatgcagccataataaaaaaggatgagttcctgttctttgcagggacacagataaagccagaaaccatcattctcagcaaactatcccaaagacagaaaaccaaacacctcatattctccctcataggtgggaattgaacaatgagaacacttggacacagggcagggaacatcacacaccagggcctgtcaggggatgggggcctaggggagggatagcgtcaggagaaataccttatgtaaaggatgagtcgatgggtgcagcaaaccaacatggcacatgtatacatatgtaacaaacctgcacattgtgcacatgtaccctagaacttaaagtataatttaaaaaaaattagccaggcatggtggctcatgcctgtagtcccagctacttgggaggctgaggcaggggaaatcactcggacctgggaggaggaggaggaggttgtagtgagctgagatcatgccaccgcactccagcctgggtgacagagtgagactctgtctcaaaaaaaaaaaaaaaaaaaaaaaaaaaaaaaaaaaaaaaaaagaaagaaagaaagaaagaaagaaagaaaagaaaagaaaatatttaagatggcaaatttcatggtatgtgtttgttaccacaatcaaagaaaaggttaaaaagaagtaaaggaataaaaggaatgatggcaatattatagcaaatagggaatatatttaaaaagatagaaataattaaaaacaactaaatgggaatgtggagttgaaaagtacagctgaaatgagaaattttccagagggaatttatctagagagaattctcaatagtaggtttaaactggcaaaagaaagaatctgtgaacttgaaaatagattaagattatgcaacttgaagcatagagaaaaattaagaatgaagaaaaatatacagggcctcagagaaatgtgggacactgttaagtgcaccaatctacacataatgggcataccagaagaagagagagaaaaaggggccagaaaaaatattcagagaaataatggcaatagcctacacattcattaagcacaataattccaagtgggataaatgcagacatccacaaatggacacctcataataaaaaatattggaattcaaaaagaagcaggagatcttgaaagcagaaaagaaatatgactcatcagtttcaagtggaccccattaatataacagcctatttctcagcagaaacaatggaagccagaaggcagtgggatgacatattcaaggtactcaaagaaaaaaaagtgttaaccaagaatttttaaccagaaaagctatctttccaataagaagatgaaatactttccaagataaaaagtgagagaattcattgctaacagacccgccttactagaaaaactaaaggaaattcctcaggctgaaagcaagtgactccagattgtaatttgaatccatgtgaaaaaacaaacagcaccagaaaggcaattatgtaacggtagaagacactataaatgtatatttattttgcttccaactgattttaaaacaactgtataaaatatgtgtatctaatacattgttgggcctataacatacgacaaaacatgacacagacagtcctcaacttacaattgttcgacttacaatttttcaactttatgttggtgtgaaagtgatatatactcagtggaaattatacactgaattttaaattttgatatttttgtgtgctagcaatgtatgctatgatactctcttgtgatgctgggaggtggcaatgagcggctcccacttagtcatgcaatcacaaaggtgaacaattgatactatataatatactatatttaatacattacttgagctattcaacaccttattgtaaaataggctttgtgttagatgattttgcccaactgtaggctaatgtaagtgttctgagcatggctaaggtaggctagactaaactatgatgtttggtaggttaggcatattaaatgcatttttcacttgatatttttaaattacagtgggtttatcaggatgtaactccatcataagtcaaggaacatctgtatatgtgtaatatatttgccaatagccacacaaaggaggtaggtgacagcaaagctgtattaagctaaggaaatgactacagataatgagctaataactatagcaatatattgttctgtttgtgatattaatagttgtaatatgtatacaataatgctactaaaggggggaaaataaatagagctgtgtagcagtaatatttttctatatcattggagttgagctagtataaatctggatctgattctgataagttaagatgatctaggtaaaacctagatcaaacatactttatattatgttcagaagaaactcaaaatatagtacaagaatcatttaaaaaattaaaactctacactaggaaatattcatttaattcaaaagaaagcagtaaaggaggactagaggaagaaaaaaagacaaggcacatatagaaagcaaaagtaaagtggcagatgtaaatgtaaccatagaaataacgttaactatgaatgaattcaacaatcaaatctaacggcacagtttttctgactaggtttgaaaaatgtgattcagctatatgctgtccaccataaacatactttagattcaagggtacaaatagaataaaagtttaaaaatggaaaagatatatatagtgcaaatagtaaccacaagagagctggaatacctatactcataccaaacaaaatagaaattaaaacaaaaatatcaatagagaaaaaagacattttattatgataaaagggtcaatgtttaaaaaaattgaacaaactaggaatagaagagtatttcctcaacctgataaaggtcttctttgaaaaacccatagatgaaacccataggtgaaagggccaattcttccccactaagatcaggaacaagacaagaatgtccactctcattacttctacttaacatttgtactggtggttctagccaggacaataagacaagaaacaggaattaaaatcatgcagattgggaaggaaaaagtaaaactctctctagtcaaagatgacatgattttgaatatagaaaattctaaggaacccacaaaaaacctgtcataactaataaaaacaagttcagcaaggttgcaagatatgagatcaatatacaaaatcaatggaatcttttacactgaaaaatgaaattaagaaagcatccattcataatcacatgataaaggaataaatttaactaaaggaagtacaaaaacaatcaggaaagaaacaggagtagcaagaaacagctatagattgcatggttctttcctgacaaaatcagtatgttgaaatccagtccccagtgtgatagtatttggaagtggagcatttgggagatgattaggtgacaagtacagagccctcatgaatgggattcgtgtccttacaaagaagccccagagagctcccttgttcattttaccatgtgaggacacagcacaaagattatgaaccaggaaacaggccctcaccagacacaaagcatgccagtgacttgatcttgtttgtttgtttgtttgtttgtttgttttttgagatggagtcttactccattgcccaggctggagtgtagtggcatgatcctggctcactgcaacctccacctcccaggttcaagcgattctcttgcctcagcctcctgagtagctgggactacaggcacctaccactacgcctggctaatttttgtattttagtagagatggggtttcaccatgttggccaggctggtctcaaacacctgacctcaagccatccacccaccttggcctcccaaagtgttgggattacaggcgtgagctattgtgcctggactatgacttgatcttggacttcccagcctctagaactgtaagaaataaacttcttttctttattaaaaaaaaaaaaggacaaaaaaaagtttaaaaaatggggcttgtctccaagtgaaataaataaatggccagtgagcacatgaaaaatcctagacattattagccatgagggaagatgcaaatcaaaaccacagtgaggtaccccttcaaatatatgagggtcactggaataaaaaagtagtaaaacaataataccaagtgttgacaaggatagcaagagaatggtgccctcataaactgctgatgggcatgcaactgttgcagctgctgtggaaaacagtctggcagtccctggaatggttaaacgaagagcagatgacaccgcagttccattcctagatatgaagctaagtgaaatgaaaatatatgttcacaaatgagaacacatggacacagggaggggaacatcacacaccggggcctgtcgggggggtgggaggcaaggagagggagagcattaggacaaatacctaatgcatgcggggcttaaaacctaaataacgggttgatagttgcagcaaaccaccatgacacatgtatacctatgtaacacatctgcacattctgcacatgtatcccagaacttaaagtaaaataaaataaaacaagaaaatatatgttcacaaaaatttctacatgagtgtttatagctgcattattcacaatggtcaaaaggtggaaagaacacaattgcctattgtcatcggtggaattgtgtcccctaaaaatacatgttgatgtactaacctccagtttctcagaatgtgaccttatttgtaaatagggccatcacatataatcaggttaacatgaggtcattggggtgggtcttattccagtctggctggtgtccttattgacaccagagggaacgagggagacacacagggagaagaaggccatatgttgactgtggcagggactggagcaatgcatccaaaaccaagaaatccaaaccaagaaattctaagaattatcagcaaatactaaaactggaagagtcaaggaagattgatctcctacaggtttcagaaagagcatggctctgctaacaccttgattttgaacttctagcctccagaactatgagacaatatatttctgttgtttttgcttttgttttatgggtttttctttttgtttttgagacagagtctcactctgtcacccaggctggagtgcattggcacaatctcagctcactgcaacctccacctcttgggttcaagtgattctcctgcctcagcctcctgagtagctgggattacaggcacgcaccaccatgccgggctaatttttgtatttctttagcagatacggggtttcactatgttggccaagctggtctcaaactcctaaactcaaaagacccacccacctctgcctcccaaagtgctgggattacaggcgtgagccatcgtgcccagcccatttctgttttttaagccactaagtttgtggtactttgttatatgtacctaggttcccaggcagccctaggaagctaataaactcatccctggataaactgataaatatccatacaacgcaatttcgttcagccacaaaggggaatgaagtagaacttcatgctatgactagcatgaacccttacaaaagtgttagtgaaagaagccaatcagaaaagatcatataatatatgactcaatttacatacaagtcaagaatagagaatctaggccaggcacagtggctcacgcctgtaatctcagcactttgagaggccgaggcgggaggatcatttgaggtcaggagttcaaaacctgcctggccaacatggcaaaatcctatctctactaaaaatacaagaattagccaggcacggtggtgagtgcctgtaatcccagctactcaggaggctgaggcaggagaatctcttgaacccaggaggcggaggttgcagtgaacagagatcatgccattgtactccagcctgggcaacagagcaaggctccatctaaaaaaaaaaaagagagagaaagaaaagaaaagaaaaaaagaatagaggatctataaagaaaagtagattcgtggttactcagggcggggaattgagtgtggggggaaagcagtaagacaaaggtatgaggtttctttttgaggtgatgaaaatgttctaaaattgaccatggtggtggttgcagtattgattaatacacccaaacccatttaattgtacactttatgatctgtaagttatatcaataaaggcgtttttaacaagaaaagaaacagataaaaagaaaaaaagctcacagtaaagaaaatgtcctctctgacttataggtcttgattagttctaggaagaaaattgattcacctagtttctgagaaatgtttactctaattaaatgaattacttccagggaatagcaggagtaccgattctctctaacctgcctcatacttcctggtgttacctaatccacctgggcttcctccatcacagtcctccacattctactctgtgctcccttcatcagagctatgctgggctatgctgggctgtcactgtgagagatggagcactcttccctgctgggctgtgagccctatgtggtgagtcactgagcttttcctggtcaccattatgtcattaggtccttctgtgggccccttgaaagaacctgatgtgtgttgaataattacaatgtaatgtcttatcttatatcctcagaatttctaggaactttttttttttttgagatagaatctcactctgtagccaggctggagtgcaatggctcagtctcggctcactgccacctccgcctcctgggttcaagtgattctcctgcctcagcttcccaagtagctgggactacaggcacgtgccaccacacctagtgaattttagtatttttagaagagacaggctatcaccatgtaggccaggatggtctcaatctcttgacctcacgatccgccctccttagcctcccagagtgctgggaatacaggcgtgagccaccgcaccagcctctaggaactttctaataggctcgcgtcataaatagaaatgaaggctattttgaggacctatagctcttctgtgctttacctaaagagagatcaacaattctctctcctgcttaatgtattcttttttttttcccttgagacacaatcttgctctgtcaccagactggagcgcagtggcgtgatctcagctcactgcagcctctgcctcacgggttcaagcgattctgctgcctcagcctcccgagtagctgggactacaggcacatgccaccatgcccggctaatttttttttttttttggtagagatggagtttcatcatgttagccaggctggtcatgaactcctgaccacaggtgatccacgcgccttgccctcccaaagccctgggattacaggcgtgagccaccgtgcccagcctgctttatgtattctatttgcacgtaagatcatttgaaaaaaggttttcacagctaaaaatgtttgatgcccattgtactgtgtacttgtgaggtgtgtttgtagctctgagatgctgtatttatagaaggggtgccaaggctttaatgatgtgggtttgtatgttggtgtctgtggtgggcataggaatgtgctacttgaatcttcattcatggagaactttccaatcagcttcaataagggcagtgagctgagagtctccagttgcagcaccattaggacccacctcagcatggagcggaacccatgcttttccaaggaagccccagatagtaattaaggactcttggatccagggcataaccctatctgcccaacataagccatccccaacagcatttttctgtggattatgggtctgttatctctgcctggtggtcttggcctgtccctgtccaatcctccttccttcctttctttcacaagtattggatctgcatcctggtctgaagactttttctgctactagtgtcatctgcttccttttttgtctttcacatgcattaccctcctccctccaataaaatgatgaacccctaactccatctaagtcttagcttcccagaagatgtaattcccaaaatgtacataatggtgcttattgtttgtttgttttgagacagagtctcccactgttgcccaggctggagtgcagtggcactatctcggctcactgcaacctccccctcccgagttcaagtgattctcatgcctcagcctcctgagtagctgggattacggggatgcaccatcacgcctggctaatttctatttttagtagagatggggtttcactgtgttggccaggctggtcttgaactcctggcctcaagtgatctgcccaccttggcctcccaaagtcctgggattacaggtgtgagccaccatgtctggccgcatttattgtttattatatacacagtctcaaaactcttttctgattttctaagtacctcctattgtgtggctcttgatcagggacaaggctttgcctcccactacaacagctgaaggaggtattcattcttcctcacctcaccttgaaccctaaggttttaacatgtggctagatatctggaactcttaatcatgaggatgtgagacaaaaacacagacacaatcaggaaatcatctatagtggcatcaatgggtctagagtcccatggcagtacccagggggtgggtcaggtgttcagtacccaggagatgggtggtgtggcagcaggtcctaccgaatagctttgaacattaccttggctggtggtcccctaccacagcctcttttttctactcatattcttacgctgtttttccagaattgctgttaattttgtgagctaaacaatcaccttccagtagctaacagcctttctatttaaaataaccaaagtcactttatattgcttaaaaataggaaccctggctgggcgcagtggctcacgcctgtaatcccagcactttgggaggccgaggcaagtggaccacctgaggtcaggagttcgagaccagcctggccaacatggtgaaatctcatttctactgaaaatgcaaaaattagctaggcgtggttgtgcacgcctgtaccccagctacttcagggggctgaagcaggagaatcgcttgaacctgggaggcagaggttgcagtgagctgactgttatgggtcccgaggttccctggaggtgacaggttgaagaagtgatcaaagatgaggtgtgcactcctgcctgaactcccactttctctcacaccctatatacaataccgtagcaaaccccaccatctcaggcagtgaaatagttttcaaatctaccacctcctccccagcttcactgctgctgctgggtctgagtcaacatcaccagttgtagtagcctgctaataggtctttgctttcatatccatcatatgatagctagtgtgagcccattaaaatatgtcagtacatatcaccctctgctcaccatccctccaaagaccttgatcactctcagggtaaaagccaaaacctcaccttggcccacaagaccccacacagtctggcccccatcgcctccctggcctcgtttccttcactcctactctgcctccctcctccatgccagctacacctgctccctgtggattcctggatgcacacagcctcctgccttaggactctgctggtttgtttgtttgtttgtttgcttgcttgcttgtttgtttgtttgtgacagagtctcgcactgttgcctgggctggagtgcaatggcgtgatcacagctcactgaaacctctgcctcccaagttcaagtgattctcctgcctcagcctccccagtagctgggattacaggcacctgccaccagtcccggctaacttttgtatttttcttagagacaggggtttcaccatgttggccaggctggtctcaaactcctgacctcaggtgatccgccagccttggcctcccaaagtgtgaggattacaggtgtaagccaccatgctcagtcgctgctggttttttgttgttgttgttgttgtttgttttttgtgtttttgtttttttgttttgagacagcatctcactctgttgcccaggatggagtgcagtggcaggatctcggctcactgaaagctctgcctccctagttcacaccgttctcctgcctcagcctcccaagtagttgggactacagccgcctgccaccacagccagctaattttttgtatttttagtagagacgaggtttcactgtgttagccaggatggtcttgatctcctgacctcgtgatccgcccacctcccaaagtgctgggattacaggcgtgaaccaccgcaccgcgcctggccactgctgttggttaatcattctgtcaggaacactcccttcccagatatcttcatagcttgctgctccaccaccttgtgaaaacacccctaaccatccatttaaattccaatcacagaatgcatatcccacttaccagccttgcttttctaatgcagtatgtcatttgcatatttgtttcatgtatgctttattgtccaccttccttactagaatgttagctccctgatggcggagtttttgtctgttttgcttactgatggatcccaagtccctgaagactacgctggcacttgttgggtattcagtaaatattgcctgaataaatgaaaaagagggaacgtttctgtcagttaatggagtttggaaacggaatgatagaaggtgggaacaactgagctatcctcaaaaatggagtggagagagcaagcatggtggctcacacctgtaatcccagcactttgggaggctaaggtgggcagatcgcttgaggccaggatttcgagaccagcctgggcaaatggtgaaaacccatctctactaaaattacaaaaattagccaggtgcagtggcacgtgcctgtaatctcagctactcgggaggccgaggcacaaaaatcacttgaacccgggaggtggaggttgcagtgagcctagatggtgccactgcactccagcctgggccacagagtgagactccatctccaaacaaacaaacggactggggagtatttggaattgggagttgtgctgagagcaactggaaaggaagattagaagaagagatgatggcggagaaaggtaaggagcaagatgggtgaggatggggcattttacccaggggaagtcactggagagcagctggcagaaactataactaataacaagtcaagaaagacatttcaaactgttggctgtgccctacatcgctgtcacacacaatacacaataaacttgctatgctcaacagacttgaggtctttgttcacttttcgggggctggtggaaatgagaaccaaagagaaaggattttagactacattttggtcaaaatcagagcacacacaaaaagggacaatatgaagacacagggactgcagtaataatttgatgcagccagaaacctaagcaacggtgaccatgtgaccatgaaacctgcaggcagaggtgcaaatcttgcacagggcgttgctcttctacggcaggggaagacacgcagctgtaccttctcaggtgaccctggctgactctgtaatcatagtgcctcctcttagggatgcttgaggattagtaagatgaggaagagggggtgctcctgaacacgagaggagagctgcgttcttcaccgcttcctccttgccccgcaggaggtgtagctcagcgggccacaagacagagctcgtaggtcggggggatgttgccaaagcctgagagcttgggggtgatatcgatgtccacaggcggcaccagcgagtgtagagagaagttctgaagggtggaggtgaagtagagaaagagttccatgcggtccatggcctcgcccaggcagatgcgctttcctggaggcacaggggagggcagaaggaagggtcgcacctgcacaggtcatggggatgtcggggtgtctggactgaccaccccactgagcctcagctgcctcatcggcacctcagggctcatgactgtgactgctttataaaggggtgttacacaggcttagtgggtacctatagttagtgctcagctaggacctgctacttctctgatggctgggattccatctcgttccaagagggaatggttctataggatccatgagtttcaaggttgtgttcatttcagttcctcaagggtttgtcaaatgcctattaggtgccagacactggtgacaaaaaaagtgaaaactcacccttaataacacttactgtttgtaagccactcttccaattgtttggaggcattaatccctgtttcacagatgggagctgaagtgactcacccaaggctccaccatttctaaatggtggagtggagtccagattcccaaccactgtcctgactccaggttccaaatgacatacactttttgttgttgttgttttttgtttgtttgagacaggatcttactctgtcgcccaggctggagtgcagtggcatgatctcggctcactgcaacctccgcctcccgggttcaagtgatttttgtgcctcagcctcccgagtagctgggattacaggcacccgccaccacgcctggctaatttttgaattttagtagagacagggtttcaccatgttggccaggctggtctcgaactcctggcctcaagtgatccgcctgcctcggcttcccaaagtgctgggattacaggcatgagccactgtgccatgccaacatacacttaaaatgttgctgcataaagattttatgacatgagtaggcaaatgactgtctgttgggcaaatttgccctgctgcttgtgttcatacagcctgcaaactatgaatgcttttggcattttaaaatggttggggaaaaaagactcttttgtgttatatgaagataaaacaaaattcaaatttcagtgtccgtaaacagtttttcaggctcacatgcacactcattcatttatatattgtctatggctgctttcatagatcaatggcaaaggttcagagactatctggctggaaaaatagaaaatatgtcttattttgttcttaacagccagttggtttatgccctgtttagtgctattactgagccaacttttttttctaattatcagagtcaatcgttctaatatttactaattctgggattctaaaatgttgtgtggttctatgatataaccttcaaattcacattgtgacttgaacttcaaatacagaccagtggctggggggtggatttagcacatgcctggaggaagtcagaccagagaaacctaccagaggaaaaaggcacaaaggcttcattcttcttgaagcggccctgctcatccagaaagtgctggggatagaaggcatctgggtagcggaagtatttggggtctttgaggacagagccaagcaggggaaatacatctgtgccctggggtgaaaatgggggcagttaggagaaatcagtgttgggctacagaggtagggaaccagggagagagaggagtgcagtggaagggaggcaatgagggtgcaaccccaccttgggcagaaggtagcctcgaaactgagtgtcccggatgaggttgtgggggacacccatgggcacgatgtctaccagtctctgtatttcgtggatgacggcatctgtgtagggcatcttgacccggtcatccacccttgggagccggtgtggtccaatcacttggttaatctcttcatggatcttagctggaaggggccagaaaatatagctgagaacagagaaaaaataaacaaaagcaggaggtgtttttgctagggaagccaggacaaatcctgcattcctagctccagcagaaagagatctcaagtgaaagccatgcatgtttgctcccttcttttttttttttttttaaacagcctgtcacccaggctggagtgcaatggcatgatctcggctcactgcaacctccacctcccgggttcaagtgatttttctgcctcagcctccagagcaactgggattacaggcacctgccacccacctggttaatttttgtacttttaatagagatggggtttcaccatgctggtcaagctgatctcgaactcctgacctcgtgatccacccaccttggcctcccaaagtgctgagattataggtgtgagccaccgcacctggcctgtttggtcgcttctttaacttaacaactgacacactggtgatgctcaattactcatcagacatcgggagacaggcagcttggagtcttgaacgctgccaggacatttggtctttacttaaaagcaccaaaaagccatggtcccagcttggctctcatacatgggttttttacaaaatgggaaagaggcatgctaggtgactaggacagggttgacacaaatgacaagcggttatgtgactgattaagatcaccactggtagagttactcctcttcgcattttagggtttagggatgagtgacttcaccttctattttcttttggagatggagtcttctcactctgttgtccaggctagagtgcagtggcaggatctcagctcactgcaagctccacctcccgggttcacaccattctcctgcctcagcctcccgagtagctgggactacaggtgcctgccactgcgcccagctaatttttaaaatatttttaatagagacagggtttcaccgtgttagccaggacggtcttgatctcctgacctcgtgatccgcctgcctcggcctcctaaagtgctggaattacaggcgtgagccaccgcacctggcctgtgtgacttcacctctgaacttgtgtttcatcatcttcaaaatgagtgtgatagttggacaaggtcatagagttgtaaacattacataaagtctggtgtacaaggaactaggacagtgcttggcacacagaagcatccaataaatattgatttgatattttttctttctttttttttttttttagacggagtcttgctctgtccccaggctggagtgcagtggtgcaatcttggctcactgcaacttctgcctcctgggatcaaatgattctcatgcctcagccccccaggtagctgggattacaggtgtgcactaccacacctggctactttttgcatttttaatagagaaaaggtttcaccatgttggccaggctggtcttgaagtcctggcctcagcaatttgcccatctctgcctcccaaagtgctgggattacaggcgtgagccaccgcacccagcctgattatttagaccagtgaaagacaactcagacaatggaggtgacactagaaacatttgagtggatgtgtgttagcatctctcatctgcaccaggagaaattctttggcttgttttgaattgcattattaaggagaggggccaaaattgggaattttccttaagcaagtagtgagttcctcattactgaagttacccaaatggaccagatcataatttattggagacagattctatttaactttggcagggcggttggctcaataatggccatcaaagataaccacctccaagtctctaaaacctaatgcctggaaggctatatatataagggtaacaaaaacacaagagagactttgaaaatgccagtaaattaagaatcttgagatgaaaagattagcctgggttgttgagattcgccctcaatataatatcgtgtgtctgtataagagagaagtgggagaatcagagttagaaaaaaaaatgtgaggctgggcacagcggctcacacctgtaatcccagcattttggaggccaaggcaggtgagttacctgaggtcaggagtttgagaccagcctggccaagatggtgaaaccctgtctctactaaaactacaaaattagttgggcatggggtggcacacacctgtaatcccagctatttgggaggctaaggcaggagaatcgcttgaacccaggaggcagaggttgcatgagctgagatcacgccactgcaccgcagcctgggcaacagaggaagactctgtctccaaaaacaaagaaaaagaataaaagatgtgatggatgccagaagtaaacagaggtttgaagcagctatgctgctggctttgaagatggaggacagagtcgtgaacccaggattacaaggagtacagctttaacacccggaaaaggcagagaatcagatagtccgttggtgtcagctagtgaaagcctatttgaacttctgaaattcagaacagaaggataatacatttgtgttgttttagacgactaagttcctggtaatttgttacagcagccacaggccgcagacaccaagtagaagattaagttaaatcaccccgcaaagttggggatttcatgtttcaagtcctgaagttctaaagggtgaagagcctgaggccgtgggattctaaattttcaagatgatgtcttctttatgttgggagggggaggtaccagataggcagctcagggtggactcaccttccacttcaggatgcttcattaacagcaagaatccatagcgcagtgtagagctcaccgtctccgtgccagcaaagaagaggttcagagtggtgaggaccaagttcttgaggttgaattctgtacgaggattatttttatcctgaaagtgaggggattgtgaatggaatcactctcttctgtctttattgtctttttttttttttttgacagagtctcgctctgttgcccagactgaagtgcagtggcatgatcccatctcactgcaacctccacctcctgggttcaagtgattctcctgcctcagcctcccgagtagctggagttacaggcacccgccaccatgcccagctaattttgtgtgtgtgtgtgtgtacttttagtagagatggggtttcaccatgctggccaggctggtctcaaacttctgatctcagttgataggcccaccttggcctcccaaagtgctgggattacaggcgtgagccactgcgcctggcctattgtgttattttctcattggctttattgtctattgtatagggagacaacaggtgggtaaaccaagcgtgtctgggagaggacacagtcagaacaaaggtcctgcggcaggaacgtgcctgatgtgttagaggaacagcaaggcagaagctgggatgaatgagatgaagtgaacaatagggaggatgggaggagaagaatgtaggatgccttgtaatatttgaacatgtagggatagtagtgtatagaatttaaatttccaaaggcaaagattcaatactataaaaatataaatttacaaatgtataaaactctaagaaatgatgatacagaagtattaaccttctaaatttctatagaaatgtagaaatagatatatatatatctatagagatatagaaatagagatatatctctatacagacatagaattagagatatatctctatacagatatagaattagagatatatctgtatacaaattcagaagattaatacttctgtatcatcatttcttagagttttatacatttgtaaatttatatttttatgttattgaacctttaatttaaatttaaactctatgccctactgtccctacacgttcacatcttttaactttaacttaaatgtttaacttaaatgttaacttaaattttaaacttcagaaaagttctacatttctgaaattctaagactcaaaactacagttgtaactctctggaatgtataagctgtaagattttaagtttccaagttcctaaattttccaaattcctaaaatttctagattcaaaatctgttttaaagctgtaacagtttatacttttacagtttctatattcatctatagataaaagtaaatgctgtgaaataatgcttgttttgttttgttttgtcctcaatgcttgcagattggttgaaagttgcagcgactagaggttgagaagtgagagggaaggaccaggggaagaagaggaggtacctggtgcatcttgatgagaaagcagtcaatgaagtcccgagggttttgggggtcaaaggatgcttcgttgatcttgaccctggaggcaatgaagtccttgagctcttctaccaagtagtagatgagattgtgtcttcctggcaaatactgcatgattccagagtacatgtcatatagctgtgggaataggcaaggggtctttgtcagtgatgggctccaggggccagcatgggctgagtctggagttggacagctggactcaaagtgcagtgctgggtctaagaatcaggtgaggcccttttgcttcccagaagttgggtcctattgagacagtagttcccccttaaccctggtttaccttccaccatttcagttacgtgcagtcaactgcagtctaaaaatatcacatataataagatatttcgagagagaaagagtacattcacacaactgttgttagaatatattgttataattgttctattttattacttatgaatgccagtctcttactgcactcaatttataaattgaattttgtcatgatacgtatatatgagaaaaacttagtatctacagaattgggtactatccatggtttgaggcatccaccgggggtcttgaacatatcctccagccatgagggggaactactgtactcacctcccaggggtgtggggaggatcaagtggggtataggaaggtgcttagttaactggggttggtgcatggacagagaggtggtggggtgggcacctgtgcccagggagtgctcatctcaatgaaactctcattgatcaaccgcagcagattcaggaactgcttgtcctcatagtcgaagcgacttctgaagacaacggaactgatgacgttggaaacggtgcggctcagcaagaagatggggtcgatgggggcacctgggcagtagaaattgtttatgttggaggcaatgatcatgaatatggggtgtggagtcacagtgatgcatctgagtcccagctctactacttaattgcatgtgtgagccactttatttttgtgttttgagtctagattgaccaatctgcaaattggtttgggaaccgtttcattcactcatgaggattcattatcattatccatataaaataattagcacaatgcctggcatacagtaagcactcaagaaaagctagttgagcttaatcattattttttattattattacttaaatgtgttgttgttagagactcacatatttggggaaaagtgggataagggacacattataaaagttcctgaattctgtctagctctactgatgattccatttgggcaattagaaaaatccttcccagccaggtgcagtggctcatgcctgtaatcccagcactttgggagaccgaggcaggcagatcacaagatcaggagttggagaccagcctgaccaacagggcgaaaccctgtctctactaaaaatacaaaaattagccaggtgtggtggcaggcgcctgtaatcccagctacacaggaagctgaggcaggagaattgcttgaacctgggaggtggaggttgcagtgagccgagatcgtgccattgcactccagcctgggtgacaagagcaagactctgtctcaaaacaaaacaaaacaaaacaaaacaaaatccttcccttgccctcacctacaccttctgtaaaacaagatcagtagatctgggaagaatttctctagaataatgcacatattcataaatacacaattttatgaaaatttctggggtacatgggcatttgaagcttttatgtagacctgttaatcacccatgtagaccaggcaaggcgccttggatgtagaggaaatgtgtctctatttctacctcttatctatttttctggttttttttcagcctctctgtcttttctctatagaccccagtgtttctagaccttattttttggtgggactgaactccttttaaaacataataaaatgagtatagggtttcagatttgcaagataaaaatgttcaaaagatttttttcacaacatgaatatacttaacactactgaactggacacttaaaatgatgaatatggtaacttttatattatgtattttttaccataatacggatatacaaatgtaatgaaatttgagcctgtcttcaagaaaaatcacaaagtcacatgtcaccaaaatctgcataggatatcaagagctcacagacagcctgagatccactgattaaagtttctagtaagtggtctctgagggtcttccatgttaactggttttttttatttttgagacagtctcactgtgtctttcatactgaagtgcagtggcatgatcatagctcactgcagccttgaactcctgggctcaagcaacctccagcctcagccccacaggtggctgacactacaggcatgtgccaccatgcccagctcatgtaaactcttaatatggaagctgccagaaatcttagtggattcttaatattttccctcttcttcctttccagacctttctcccaccaaagctcatcctctcatgactgagagctccataaccacccagtcacccagtggtcctcccccttgtggcccccatacccttggtcttccggaactcctccagtaggtagctggcctcctcctgaattcgctcctcaatgctccgctttcccatcccgaagtcccgaaggatggtcagggggaagcgtcagagaatcctccatcgttctccattggccagagctacacctgccaagatctcagtctcaggcttctgcctccctccccttgctgtgttcaactctgtactagacagtgatggggacagattatgaaagctctagactctgctgtcaaggaagccattctcaaccttcaaggctcaatcaagagagtaaggttctctctctgcaggatcctcaaaaaaaaaaaaaaaaaaaaaagtccagactgaggtggaggaaaagggaatcagtgtaggaatgataggaggagatcaaagagtgtttcttacaggaaggagaggtggaactggaaaaataaataaataactgagtgaatgcataggaaggtggaaggtggagggatgtatggacagagtgccatatagagtgccctggaatggggatattaattctattttctatgtaatacttggattctctgaacgtacacatatgtgtacacagaagctcacacttgtacatcgatatacctacagaaaaggagttatcatgtagtaagacacatttagaaattactaaatgtgtggactgatgagagtcttaaaccaattcactagatctaatgaaattattttgctttattgatgaatggaaggaagagtttatgactggaatgacggatggatggatggacagacggacggacagatggatggatggatggatggatggatggatggatggatggaagacttaatagatgggtggatggttaatggatggatggtttgagatagatggataacagttggagagtggatagattgatagatgtatgaatgatgaaagcattgatgaatggatggaatgatggatagatgaatacatagaaagttaattgacagatgtatagataatagagtgaaagatgtttttatagaaagaataatgagtggattttctgatgaatatggatcagtggacaaaaggaagaaaaggtaatagaaagatagatagatagatagatagatagatagacagacagtatgtggtgagtctgcttggaattgaaggatgtgggcagttagagatggattcttgggagaaaaagatctacctaagtgaagaaggcagagacctatgggttaggtatgtgtatgagtatatgaagatgagaaataaggttggctatgagagctttagtgggtgcataaagaatatcactaatccgccaggcttggtagctcatgcctgtagtcccagcactttgggaggctgagacgggtggatcaccagagattgggagttggagaccagcctttccaacatggagaaaccccgtctctactaaaaatacaaaattagccctgcgtggtggcgcatgcctgtcatcccagctactcgggaggctgaggcaggaaaattgcttgaacctgggaggcagagattacagtgagccaagatcgtgccgttacgctccagcctgggtaacaagagtgaaagtccatctcaaaaaaaaaaaaaaaaaaaaaagagaatatcactaatccattaaaataagagcagaaataacacagaagacacagaagacagtttagagtcggatggcataggttcataataaagtgatcctaccacttactgtgtgacattatctaacctttagcttagcttttttttttttttgagacagagtttcactcttgttgcccaagttggggtacaatggtgtgatctcagctcactataacatctgcctcccaggttcaagcgattctcctgcctcagcctcccgagtagctgggattagaggcatgtgccaccacacccagctaatttttatttttagtttttagtagaaatgaggtttcaccatgttagccaggctggtctcgaactcctgacctcaggtgatccaccccactcagcctcccaaagtgctgggattacaggcataagccaccacacccggcctatcttagctttttcattgacaacattagtataatgttaacagctctcctaagggagtcaatacagtaagtcatgtggactacttaccaaagaacctggcatatagggagtgcattgcagtcatttccggttttattgtttttgttgttgttgctacctaccatgaccttggaagttttgctttattgaagccagttctccacggccactgaactcatccgcttggtctaccaaggcttccttcactgcttcatgtccacataaaaccaccactggccggggacccatgtacacagtgaacacagggctgtatttctccctgagcttggagtgaaggaaaacacagtaggaggggctgattggagtaccaagcataggccaattgaggattttagaggatggcgatttcagagggatataaacatggtactaaggaaccaaggtaaatctgggcttggaaggaatactgggaaagaggcatggaagtcttggctcctgtcacccttggcaaaagctcatccctccccgcaagacttactgtctgcatctctaaaataatggacctggatttgatgaattctaggattcatacttctctctctgaaatgttaaatttctagactcttaagacttcatgataccaactctcaaagtgctaagacaacctgagtcaaagagtccttgtgtttaaaaatataatgtactgtgattccaaagtcctcagatcatgaaaatcttatctcaatgtactgagaatgtgtgtttccaatattttaggattctgaaatttcagaattctaagatttgcaaagtctgtgtttctgagagtctgtctttagaagtcataaggttctatgtgaatctggcaataggattagttgcttttagccctattagaggagacagacagactcaccttcatgaaagactgaaacgtagcgtcagttcgaacttgcagcaggttccccaggaaaggaattggtgtaggacctgggggcagctttcctgccttattcattcatttccaggcaatgaggatgagcaggcaagacaagcagagtgccagaaagatggtgacagcccctcccatctccatggtgccaggtcaacaggttctgtcctgggcaccagatcctgcctaaataggtcctgggagatcagcttataccgaaatctgaacaccctgggattcaagttttccgggtctgaatgtcattggagaagagattgctttatatgggaggtggttatataacctataatctcccacctgagtaagggtagattgaattcacaaagggaaatcctctggggccattcccctttcttcaaatttccagtctctctgttcttctctctcagctcaacagaattgaacagaattttttggtggggtgtaagaggcagattattacctttttaggctattgattttaggatccagacaatctgagtacaagcggcagctctgtcttttcttcactgggcaagtcacttaacctctgggacttgtttctccatctatcaaatagggaaaccatgttgttttattttattttattttattttacttttttgagacagattatcactctgtcacccaggctggagcatagtggcgtgatctcatttcactacaacttctgcctcccgggttcaagcaattctcatgcctcagcctcccaagtagctaggactacaggtgcacaccactatgcccagctaatttttgtatttttctagagatgcggtttcaccatgttggccaggctagtctcgaactcctggcctcaagtgatccaccccaatcagcctcccaaagtgctggaattacaggcgtgagccaccgcagctggcagaccatgttgttttagaaagtcttgatagacaacaaggaaaactctttgttcattatttaattaaggataaccttaattaatcagttattagattttttaaattgacacataataattgtacatatttgtggtatatatatgtacataataattgtacatatgtgtgatgttttgatacatgtatgcaatgtataacaatcaaattcgggtaattattatatccattactgagacattgtcatttctttgtggtaagaacattcaaaatcctctcttctaactattttgaaatatgcaatgtattattgttaactacagccagccaccctactgtataatggaacactagaatgttaataaggaaagtaagctgaagatttagaaaacaagagaaataaatcaattgaaagggttttgttcaaagagttcttgttttctactcaagttaatgttaaataacaataatcaaagattacccatgttggtgtatcagaaatttgctgtatcaaatttaaaaaaagaaaaaaaagaactttgctgtagtgtgtgtcagtgtgtgtgtgtgtgtgtgtgtgtgtgtgtgttttgaaagtctaaggtgtagagatcacctctgaaccccagtctctggaggggaatgtcttaataatctaaaaagtgattaactaccttttctgcaccaaatattttcaaagccttattgtcctgaaatgaacttcctggatattatatcctaccctcatgtactatttaacaaaattcaatgtccttttcatgcgactgtattctcagacttggaaaccgaatccctcaaggtatctgtaggtttggggaatggggtttggctggctgagctgaggcatcctgtgtccagaagtggtggaaattctgggaaagctgagtgactcacacacagtgccaccttttgtctcttggatctgctgctagaatgtctttcttggagtagagactcagctcagcccatctcctttgactcccttagctttcaccttcccatcccattctgatcctcaccccccagcacttaacacccattcaggactaacctcttaaccatcttgtggtggtggcatgtgtgtggtgatggtggttggttgtgagtctggttttcctattcagacaggaagggagagagcaagtactcttagaacagctcccttcaccatcccacctccagacaggaagccaggaatggaggaacttgaactaaagttcagctggagttcagtggtgtgatcttggctcactgcaacctccgccttccaggtgcaagcgattctcctgccttagcctcccaagtagctgggattacaggcacccaccaccacgcctggctaatttttgtatttttagtagagatggggttttgccaggtaggccaggctggtcttgaactcctgacctcaagtgatccacctgcctggcctccccaagtgctgggattacaggcatgagccactgcgcccaaccaaatttttttaatttgtcactttgtgccaggcatggatggagctgtgtgcttgacaagcagggtatcctctaatccaaacaaccagcttgcaaggaagggcatgttaaatagtcagagattattcaggtcaccctaaaacaaatattcttataacctgaagctgctggataaacttttttttttaaactctgtgtaatacctttcatacagaggggaaaggcattcagatgtttcaggtgcttggaggtatagctctcattgtcatctggtttgatatattaaattcatatatgactgtatttgagaaaaggttcatatttcagaggcacctagatgtctcccaatatttgttttccctgtcttccgtagtaatagaattctatccagctacatgattatctagagttaaaaactacatttcccaagctcccttgcagctgcgtatggccgtgtagccaagttctgaccaatgagaagtgagtgaaagtgatgcctgcaactttcagtttatgcttttagagggaggggcaaggtttccttccagaatatttcctctttctggctaactgggatagcaagagcaacaacttaggaaggagcagcagcaacatggaaggagcctgggtctttgatatcagtgaactgcctgatgagctcagggttgcttatgcagagccattaagtgtaagaaaattaaatttccacagggcgcggtggctcatacctgtaatcccagcactttgggaggccaaggcaggtggatcactggaggtcaggagttcaagaccaggctggccaacatggtgaaaccccatctctactaaaaatgcaaaaattagccgggcgtggtggcacacacctgtaatcccaactactcgggaagctgaggcaggggaatcgcatgaacccgggaggccgaggttgcagtgagcccagaaggtgccactgcattccagcctgggtgacagaacgagactccatcttcaaaaaataaagaaagaaagaaaattaaatttccatcttatgtaagcccctttaaaccactgttttgggtctttgttatagcagttaacctatatcttaggaaatttggcttctgtgaaaaatgcttgaaaaatcattgaaccaagataagtgcttgttgccttcttttttattgttgtgtctgagtaccacccatatatgaatttaatgtttctttaattgactctcctttttaagaacttaaattcattaagatggaacttggtatttctccctttaatggaaaattagctattttctatcataactagaaaatacctgtgtattagttatctaatactacataacaaaacagctcaacacttagaggcttaagacaacaacgatttgttatttcccacagtttctgtgtgtcaatgtaatttaatgccatactctcccacatccatggggaagtcttcctggtactcatacctgcccccaacttcttttctgcatctcctttcactcttaaactcaagcttagggttcaagtctaaacacagcatgtcagagcttgaagaggtctcagaaatattattagttcagtgtttctcaaaaggtataaaatgcataatttgacccaatgtatacccatggagtataaatcatcagttgtgagatactgcaagattccttgtaaggaggatgtatgtatggatttgagtattacagatgatgataataaacatatttaacaaccagggcagcacaaacattgtctgaagatggagtagggtcctagaggcctctgtagttgctgaattatgggactattggtaagagtggtcctggagaagtggttgaatttcccatttaccaactgctctcgtttggatgtttgtccctgcaaacctcacattgaaatttgatccccaatgttggaggtggaaattaatgggaagtgtttggttcatgatccaggagttacctgatgtcctcctcatggtaatgaatgggttcttgctctattagttaccatgagagctggttgtttaaaagaatttggccataccctctgtctcttgcttcttctctcactatgtgatccctgcacatgctggctctactttgccttctgctatgagtagaagcagcctgaagccctcaccagaagcagatgctggtgccatgcttcttgtacagcaggcaggactgtgagccaaataaatctctttttattataaattactcagccacagatatttggtaataacaacactaaacaaactaaaataccaacctctatcaaaagatgctctaatagtccaggtgtgttggctcacacctgtaatcccagcactttgggaggctgagatgagtggattgcttgaggtcaggagtttgagaccatcctggccaacatgatgacatcccatctctactaaaaataaagaattaaaaaaaaaaactagcttggcatggtggtgggcgcctgtaatcccagctactcaggaggctgaggcaggagaatcacttgaatctaggagacagaagttgcagtgagccaagattgcgccactgcacttcagcctgggcaacagagccagaccctgtctcaaaaaaaaaaaaaggctgtaataactcgtaggaccacacctgtgtacgtgtgctgaattttgtccttaggcattgtccttaagaagtttccttcttcccaggacaggggcttcatcagggctcgacgcagaacatgcaggtgaggggcagggcactgtgaacctggcagaagagctgattattaaatgttcggtaatgatgtgagcttattatgaaatagtcattattaattaaattacgcaaacaaaaacggaatatattatacttttaaaagaaggtaataagtactcaaggctgatcacatcctaattattttactagagtttaccgttatctgtgctattgagatcgtttatgtctatttgtgtctgtatagtgaaaatactatatgatggcatggttttgcacatctcttcccaactccatgttcagtgacaccaccttggccagttgtttgaaattggccatagtgaatgcatgcacagcacagcaatcagaaaactctacaaatgaggtctttttttcctaagagccagctgataaacatttaccagcacaaccctgtgggtgcttttccaaagctgaagatctgggcttgggatgatgtcagcaggtgcccaagggagagtgggggaagtttttcaggaactcactgatatcaagaggaattctatgtgggttgggatccctgtggaagtctccacctccctttgagcaaaggagatggaagagaaagctaggttggagttcagctggctgtagtgttcatgtcttggataatggcatgcggggagcaccctatgactttggagactgacagacatgaagaccatagaaaaagtaagcctccctctgtgagccttttttcaatctgtgtttgggggatgataacaatagtaccttctgtgtagcgttgttcggggttggtgataacgtgcatcgaaggcccttagcacagactttgcttggcacatgctcaaccagtggaaggcttttagcatgattaaatggttgtaaaatggaatgatcctaagagtccctgaaaatgaggccttggacactatctgtgtctcagtttccccatctggaaaatgggacaaatggttgtattgatcttctgaggtatttgggacaattcaatgagttgtgacacagagcaagcatttaataagtgtttgctaatatgaaaattagagttctgctgcgacagtggagctgggaccaggaaaagctgagtggagaaaggatattcatccccttcaccatcaaaacctgggcaaatctgttggtttcctcttggctgcagtagaagggagggtagctagaattggacattttcttctaaggaggcaaaataagtgtgtccaggagatcttcatgggtagtctaagaagacccattatgggcagtgttttatgggatggttccaggactgagctaaacagcctccccaagctggcattttcctaagattatgctattctcagaatctattgttctaatgtttggggattccagaattctgtgatttttaagttttcaatactatgtggattcttccagttgggagtggggtgcagctttaggaaagtaaggagctgaggagggagaggcagtctcaccaacatccacctcctcctggatgtttttatcagaagcaaaaaggtaaagtcagtgcacagttttggttgctgtaggtcccaacgcaaaacaaatgtgtggagtcctaggaaccaaattttaggggtctgaaggtggtacctggatcattcttctcttggggagtgccatcatttccaagaggctgaagaagagatttggagccaacaaacaagacatagaatttattgaagacttacatatacggtggtcccagagcggccacctggacaggaaaaccactaacgtgtgtaaaaagcatatggtttatacaggattgtcacttagcaagctccacctagcaacctccatttaacccaaaacaaagagccttgatcccttgtatggcctgcattacaacaaatgggccaggggttcagatgtccttcccagatatggagtgaatctctgggttggccactcccttatttcttagctcagaaatcccaacttacattcttcctagaccattctcagggtatgcttgagatattgctgtcaagtatgtcttccatacatagggctgagaaaaattattcaaaacacggcaataaggtaaaactgattatgggatgttttaaagtcaagttaagcatattttctaacaagcccacttaaaggtaatttcattccaaaatggaatgtctctttgtttgcacaattaattagtgtctaagcttttttaacttttattttagcttcaggggtacatgtacaggatttattgtataggtaagttgcatgtcatggggtttggtgcacagattatttcgtcacccaggtaataagcacagtacccaataggtagttttttgatcctcaccgtcctaccacctttaaacctcaaataggtcccagtgttctattgttcccatctttgtgtccgtacgttctcaatgcttagctcccacttacaagtgaagacaagaagtatttggagttttgttcctgtgttactttgcttgggataaaggcctctagtttcagccatgttgctgcaaaggacatgatctcattctttttatggcagtgtagtgctccacagtgcatatgtgccacattttatttatccagtctaccactgataagcatttaggttgattccatgtgtttgctattgtgaatagtgctgcaatgaacatacagcactatttatctatttttatggtagaatgatttatattcctatgagtagagacccaataatggtattgctgggtcaaatggtaattctgttttagattctttgagaaactgccaaactactttccacaatggctaaattaatttccatttccaccagcaggtataggcgttcccttttctctacaaccttgccagcatctgttattttttgacattttaataatagccattctggctgggcacggtggctcatgcctgtaatcccagcactttgggaggccaaggtgggtggatcatttgaggtcaggagcttgaaaccagcctggccaacatggtgaaacccctcctctactaaaagtacaaaaattagctgggcgtggtggcgggtgcctgtcatcccagctactcgggtggctgacgcaggagaattgcttgaatccgggaggcagaggttgcagtgagccagccaagattgtgccactgcactccagcctaggtgccagagcaagattctgtctcaaataataataataatagccattctgactagtgtgagatggtatctcattgtgattttcgtttgcatttctctaatgactagtggtgttaatcattttcatatgcttattggccacatgtatgtcttctttcgaaaaatattcatgtccttttcccactttttaatggggttgtttcttttcatgtaaatttgtttaagtttcttatagattccagatattagatctttctcagattcataatttgcaaatattttctcccattctgtaggttgtctgtttactctgctgatagtttcttttgcagtgcagaatctcattagtttaattaggtcccacttgttaatttttgctttgttgcaattgcttttggcagcttcatcatgaaatctttgccaggtcctatgttcagaatgctatttattccctaggttatcttccagaatttttatgattttagattttacatttaagcctttgatccctcttgagctgatttttgtatatggtgtgaggaaggagtccaatttcaatcttctgcatttggatagccggttatctcagcaccatttgttgaatagggagtcatttccccattgctcattttgttgtctttgtcaaaggtcagatggctgtaggcatgtggcattatttcttggctctattctgttccatttatcaatgtgtgtgtttttgtaccagtaccatgctgttttggtaactgtagccttgttgtacagtttgaagttgggtaatgtgatgcctccatctttgttctttttgcttaggattgtcttggctattcaggctctttgttggtttcacatgaatttttaaatatttttttctaattctgtgaagaatgtcattggtagtttgatacaaatagcattgaatctgtaaattactttgggcagtgtggtggttttaacaatactgattcttcctatccatgaacatggaatgtttctccattggtgtcatctctgatttctttcagcagtatttcataattttcattgtagagctctttcacctctttgattaactatattcctggatattttattcttttgtggctattgtgaatggtattgcagtcttgatttggctatcaggttggatgttgttggtgtatggaaatgttacttgtttttatacattaattttgtatcctgaaactttgctgaagttgtttataagatcaaggagattttgagcagagactagggggttttatacttatagaatcatatctgcaaacagggataatttgacttcctcttttcctgtgtgtatccccctttttttttttccttctgcatgattgatttggctaggacttcccgtactatgtcaaataggagtggtgagacagaatccttgtcttgttctggctctcaaagagaatacttccagcttttgcctgttcagaatgatgttgactatgggtttgtcataaatggctcttatgattttgatgtatgttccttcaatgcctagtttgttgaggatttttaatatgaagggatgttgaattttatgaaaaggcttttctgcaactattgacaagatcatatggtttttgtttttagttctgtttatatgatgaatcacatttactgatttgcatatgttgaaccaactttgtatcacagagataaagcctatttaattgtgatggactagctttttaatatgctgctggattcagtttgctagtattttgttgaggattttggcatctatgttcagcaaggatattggcctggagttttctttttttggttgtgtctctgccaggtttgggtatcagaatggtgctggcttcatagaatgagctggggatgagtccttcctgctcattttttttggaatagtttccgtagagatggtactacctctttcttatacatctggtcgaattcagctgtgaatccatctggtcctgggctttttctggttggtaggattttattactgattccatttcagaacttgttattggtctggtcagggatttaatttcttcctggttcaatcttgggaggttgtatgttttcaggaattcattcatttcttctaggttttctagattgtgtgcatagagaggttcacagtagtctctgtgaattttttttttgtatttcagcgtgtcccatggtaaaattccctttgtcattatggttgtgtttatttggggatcttctctctttttttctttattattcttgctagcagtctatctatcttatttattctttcaaataaccaattgctggactcgttgatcttttgttcatatattgtgaaaagtagtgtgatgattcctgaaagaactaaaacaagaactaccattcaacccagcaattccactactaggtatatactgaaaggaatataaataattctaccataaagacacatgcacatgtatgttcactgcagcactattcacaatagcaaatacatggaatcaacctaaatgcccaaaatggtagactggataaagaaaatgtggtacatatacaccatggaatactgtgcagccataaaaaaaagaacaagatcatgccctttgcagaacatggatgaagctggaggccattatctttagcaaactaatgcaggaacagaaaactaaatactgcatgttcccacttagaagtggtagctgaatgatgagaacacatgaacacacagaggggaacagcagacactggggcctccctgagggtggagggtgagaggaggaagaagatcaggaaaaataactggtgggtactaggcttaatactttggtgatgaaatgatctgcacaacaaacccccatgacatgagtttacctgtataacaaacctgcacatgtacccctgaacttaaaattaaaataaataaaataaaataacatttcataaaattttttaaaacagaaaacatgttcattccctggcaactccaccaaaaaaaaaaaaaaaaaggaaagaaaacatggttatatatacaatggaatattattcagccataaaaaaaagaatgaaatcctatcatctgcaggaacatgggtggacctggaggacattatattaagtaaaataagccaggcacagaaagacaaatatcacacattctcactcataatgggagttaaaaaactgatctcatgaaagtggaaagtagaatgttggttagtagaagctgtaatccctagcaagcttcaacaggggagccaatgctttcagtcagggggtggcaccacgtgtcttcaagatgaaatgcctcttggggacaaacatgctactttcaccaagtacataagctttctgcttgtcatacttaggattgaacattgtacatccttcagaagtacatcctactcagatcttgggacagtatgatccccccattttgggcatttccctcatttttggtttgcattgggttgctgctgggagaaccaaatgtctggcagcttcttggtcccttaaaaaaaaaaaatgtgcagcttcagccaggcacagtggctcatgcctgtaatcccatcactttgggagaccaaggtgggcagatcacctgaggtcaggagtttgccaccagcctagtcaacatggcaaaattccgtctctacaaaaataaaaaaattagccaggcgttgtggcttgtgccttgagatacagtgcagtctcttgtcatccactgcttccttattagagagggtagaaccaacactagctaacatcacgggccatacaggttaagcccatcttaacaattttttttcttttttttgagatggagttttgctcttgttgccccaggctggagtgcagtggcccaatctcagctcactgcaacctccgtgcccacccaccatcccccctcccgcccctgagttcaagcgattctcctgcctcagccttcctagtagctgggactacaattgtgtgccaccacacccggctaatttttgtatttttagtagagatggggtttcactatattggccaggctggtcttgaactcctgacctcaagtgatctgtaagcctcagcctcccaaagtgctgggcgtacaggtgtgagccactgcacccagtcacagatgcagatttcttacatgcatgtattgcatcatggcgaagtctaggctattagcgtccccagcacccaaatagtaaacactgtacctaataggtaacttttcaagcctcaccccctcctgcccacccacctttcgaagtctacaatgtctcttgttccactctgtatgtccaagggtatccattgtttagcttccatttataattgagaacatgtgttatttgactttctggtttgacctctttcacttagggtaatggtctccagttccatccatgttgctacaaaagacatgatttcattcttttttatggctgagtagtattctatgttatacatatgccacattttctttatccaaacctccgttgatgggcttagactgattccatagctttgctattatgaatactgctacaataaacatacaagtgtaggtgtcctttttataaaatgatttctttcttttttttttttctttttttgaggtgcagtctcactctgtcgcccaagctggagtgtgcagtggcacgatctcggctcactgcaacctctgcctccctggttcaagcgattctcctgcctcagcctcccgagtagctgggactacaggcgtgtgccaccatgccaggctaattttttgtatttttagtagagacagggtttcaccatgttggccaggctgttctcgaactcctgacctcaggcgatcttcacttctcgacatcccaaagtgctgggattacaaggcattagccatcaccttgtaatccttgcctaaaatgatttctttcttttgctgtgaagaaactcttttagtttaagtcccatttgtctattttttgttttattgcatttgtttttgaggacttcatcataaattctttgcctaggcctgtgtccaaaagaatttttcctaggttttcttctaaaatttttatagtttcaggtcttagatttaggtctttaatccatcttgagttcatctttgtatatggtgagaaataccagtccagtttcattcttcagcaaatgattatccaatcttcccagaaatatttattgaataggatgtcctttccccagtgtatatttttgctgactttgtcaaagattagttggttgtaggtaggtggctttattttgggttttctattctgttccattgatatatgtgtctatttttataccagtacaatgctgttttggttactataggcttgaagtataatttgaagtcaggtaatgtaatgcctccagctttgttctttttgcttggaattgcttaaactatttgggctcttttctgattctatatgaattttaggattgttttttctaattctgtgaaaaacgacggtgttttgatagagattgcattcaatctatagattgctttggactgtatgttcatgttaatgatgctgattcctcaaatccatgagcatgggatatttttccatttgtttatgtcatctacaatttctttcattggtgttttgtaggtcttcttatagagatctttcacctccctggttaaatatattcttatgtattttattttctttgtagctattgcaaatgtattgcctccttgatttggtccttggctagatcgttaccggtatgtggaaatgcaactgatttttgtacattaattttgtatcctaaaactttactgaattcatttctcaaatctaagagttgtttttagagtccttagggttttctaggcataagatcatatcatcagcaaacagggataatttgacttcctcttttctaatttggatgccctccatttgtgtctcttgcctgactgctctggctaggacttccagtactctgttgaataagagtggtgaaagtggcattcttgtcttcttctagttcttaaagagaatgctttcatcttttcaccgttaaatgttatgtttgctgtgggcttgtcatatgtagcctttattatgttgaggtatgttgcttctaggcctggtttgttgaggatttttatcatgaagaaatgctgatttttattgaatactttttctgcacctattgagataatcatatggcttttgtccttcattttgttgatggaatgtatcacgttatggatttgcatatgttgaaccattcttggatccccaggttaaatccgacccaatcatggtgtatgatctttttgatgtgctgttggatttgatttgctagtattttgctgaggctttttgtatctatgtgattcagggatattgatctgtagttttcttttttgttgtgttcttgtctgattttgttatcaggatgatactggcctcgtagaatcagttagggagaattccctcctcctcaattttttggaatagttttacaaggattggtattagttcttctttgtatacttggtaggattcatctgtgaatctatctggtcctggaatttattttcttgaaagacttttttttgagacggagtttcactctgtcacccaggctggagtgcagtggcatgatctcgattcactgcaacctctacctcctgggttcaagcgattctgctgcctcagcctcccaagtagctgggattacaggcgtgcaccaccacgcccagctaatttttgtatttttagtacagatggggtttcactgtgttgaccaggcaggtcttgaactcctgacctcaagtgatccgcacacctcagcttcccaaagtgctgcgattacaggcatgagccaccacaccctgccttcttgggagacttttaattactgattcaatcttgctattcattattgatctgttcaagagttctacttcctggttcaatcttgatagactgtaactgtccagaaatttattcatttcctctaggttttctagtttgtgaggctatagctgttcataatagtctctcatgatgttttgtgcttctatcctatcagttgtaatgtcccattcttcatttctgattgtttttatttttattttctcttctttcctgggttagtctagctagtggttcattaattttaactttttgaagatccaacttttgttttgttgatcttttttattgttttcgtggtttctatttcatttagttctgctctgatctttgttatttctttggctaactttgggtttgatttgttctttttccagttccttgaggtgtgacattggtcgataatttgtgatctttctactgttttttgagatggagtctcactctgtcacccaggcaggagtgcagtggcgcaaactcggctcactgcaacctctgcctcccaggttcaagtcattctcccacctcagcctcccgagtagctgagattacaggcatgcaccaacatgccttgttaatttttgtattttttagtagagacagggtttcttcatactggccagactggtctcgaactcccgacctcaagtgatccaccgcctcaagtgctgggattacagctgtgagccaccatgcctggccctttctacttttttgatgtaggcattcagtgctataaacttccctattagtactgcttttgctgtatcccacagacttttgtgttgtgttttcatttttattcatttcaaactttttttaaatttccagcttaatttctttgctgacctggtgatctttcaagagcatgctgtttaatgcccatgtatttataccatttccaaagttcctcctagtattgatggaatggaatccttttctagctttatccactgtggtctgagatgatacttgatataattttgatttttagaaaatttgttaaggtatgtttcatggcttaatatatggtctatcttggagaatatatcatgtgctgatgaaaagagtgtatattctgtagttgttgggtaaaatgttttataagtgtctgttgagtccattgggttaaagtccaatttaagtctgtatttgtccatttttgcatcactataaaggaacacccaagcctcggtaatttataaagaaaagtggtttaatcagctcacagttctgcaggcagaacatgaagcatggcactggcatctgctactgataagggtctcaggaagcttacaatcatggtggaaggcaatggaggagccagtgtatcacactggcaagagatggaagggggtggtcccaggctcttttaaacaaccagatctcatttaaactgagtgagaacccactcatcaccaaggggatggcactaagccattcatgagggatctgcccctatgatctgatacctccctctaggccctacctccaacataggggatcacatgtccacataagatatggaggggacacacatccaaagcatatgaaaggctaatgtttctttgctaattttgtctctcaatgatctgtttagtgtatgagtgggatattgaagctccccactgttattgtattctgtatatctcattctttaggtctagttgtatttgtttgtaaatttaggggttgtgatgttcggtgcgtatatattcagcactgttatattctcttgctaaattgatccctttatcattatataatgaccttctttgttttgtttttatttttaatgttttttatttaaaatctgttttaactggtataagatatagctattcctgcttgtttggtttttgtttgcatggaatagctttttccatctatgtactttcagtctatatgtgtctttacaggtaaagtgagtttcttataggcagcatatagttgcatcatggtttgtgtgtgtgtgtgtgtttgtttgtttgttttgagatgagttttgctcttgttgcccaggctggagtagtgcaatggcatgatctcgactcactgcaacctctgcctcctgggttcaagcaattctcctgcctcagcctcccaggtagctgggattacaggcatatgccatcacacccagctaatttttgtatttttagtagagacagggtttctccatgttggtcaggctggtctcaagctcccaacctcaggtgatccactcaccttggcctcccaaagtgctgggcatcatgttgtttaaagtattccgccaatacatatcttgtaagtgaagcatttaatccatttattcaaggttaatattgatatgcaaggctttattcttgtcatattgttaattgtttttaagttgttttatgtgataaattatttgtttctttctttttctctttttgtcattgtggtttgatgagattctcccatgttgccatttgattcttttctcttcctcatgtatgaggttgtttttataagaaatgtgagttttatttttctgtgtgttttcatgacgctgagtgttgacctttcatttccatatttaagacccatttgagcatctcccataggaacaggctagtgttgacaagtttactcaccatttgcttctctagaaaagattttatttctccttcatttatgaagcttattctgccagaacataaaatttttggctgacagtacttttctttcagcagttggaaatgccattctcttcttttctagcctgtaaggtttccactgaaaagtctgctgttagtctgatgagttttcttaataggtaactagatgcttttctcttgctaattttaaaattctttctttcttcttgactttagactttctaaatgtactattatgtgaagttctttttgcaatgtatttgctggggctctgtagctggatgtctaactctcttgctagatgtggaagttttcatcaattacttcctaaaaataggtgttctaattttttaaaatctctcttcccccttggaaataccaaaaatgcataagtttggtcacactatgtagtcccagatatctcaaagtctttgatgattcttttttatttatttttctttattttgtcagacaggacatttcaaaagacctgtcttcaagttcttagattctttttttttcttctaattttagagatagggtttcactatgttgcccaaactggccttgaactctgacctcaaggaatccacctaccttggtcttccaaagtgctgggattacaggcatgagccactgcacccagccatgttctgaggttctttcttctgcttggtccagtctactattgaagcttttgaatatattctgtattcccttcattgaatttttttagttcaagagtttctgcttgtttttttttttaagttatttatctaggtaaatttctcattcatttcctggactgattttctaattctttgtattgattttcaaatttctcttgcatcttgtagggctttataaaatcagtattttgaattctttatctggcatattgagggattctttttgattgggatctgttgctggacaattgtggtcctttgatgatgtcacatttttctcctttttcatgtttcctgtgtcctttcattgatatctgcaaatcttgtgtagcagtagcttgttcaagtttttttaattgccctgtaggagaaaatttttttcctgaaaaatgtatgcatgttgttagttgagtaggatactttggctttgattctgggtgcctatggtagtgtgatcttagtatgacttcataggcagtacccagggtcactggtatctttgatttccttggtagcttagagtacagttattacttgagatcgaggagaaatttagctgggtggtggatgccaactgagcccatctttgggccctggtggtggcagcagcttggagagtatggctgagccccagagcagtctactggctttggtattagtgagtcctgggaggctgattcttgagcttcctagtggcttgcttagaggagtcatgggagttgggggacagggatgtgggcaagttctcaggcccctgggaagcacaacctggtgtgatatgggtgatggcagtagtggtggtggagcaatccactaggacccaggcagtccatgttggtgttgctggtagatgcaatgggttgggtgggctactccccagtcccacagcatcctgtagcagggtagtggtattgacctaagtgtgcttaggagagcttgttctcccctgtgcctcccccatctgggtggcggctacagtggcatcacctcagacttggcaaaaagggggacagagcccaacattaaactcttatgattgtgccagctgtgggcttgtgaccaaagaggacaggcccctctctggtaagcagtatggacaagaagttgtggggagtggggtctgctcaagtctccctgtcacagcagcccatagcagggtcggggaaattgtcccaggtatatgtaaaggagctttgtttccctgtccctccttggccaggtggtggctgcagccaggtcaactcaaactgggcctgagggcagggcatggcacagtattaaactctcaaaatggttccttgggcctgcaaccagggtaagaagctgtggggaatgtggttcactcacatctcagtctcaacagcagcccgcagcaaggcagaaaggaccctcccatgggtgcctgggagtgctgggtctcctctatacttacttgaagcagcacagcagcagcaaccatttctatagatctccagtatccaggttctcaaaacagcactcagctgaggctgctctaggctcaaatgggattccatgtgggttccattttccagggcaatgtctctgcacaatctttagggagctccgtatgtcaggcccaagacccaagtgggttgagggtttctaccatagccaagatcataaaagcccatttcaaagtgtggagccctgggagtttctctcttataatttcccctcatccaggagccactctcagctttcagtcaatcccctctccttactcacttcctgtgcttcccttcttttctctgttgaatcccttctcttctctgatgaattccagcattctctcctagataatctgtttaaaatggagttcctctccacgaagaaggccatgctacctgcatctggtcagccatcttgatcacctttctacatttaaagagacacagcatgttaaaaaaaaaaaaaaaattagttcccttacgaattgttgtttacctagccctccctgtcaagaagtggtctgcattttaaaggattttaataagatgaaaaatattctagaataaatttgcagtgaccccatctcccattcttcctgtggtaaggaagaccaaaagctattttttttcttttttcttttcttttctttttttttttctaaaggaaacccctttctcctaactcccttcagaatctgctgctttttttcaccccccagtgatttcagggaattgggttgttaaaaatgttttcttcagagttaatagtttttattcacgggatgcttgctccaaaagaagctactcaaccattaccagaagaaactcttcatcagtgcacttggcagctgacatcttcgtcctcttaaaaaataaaaataaaaataaaaattttttaaagttgttcagaaatggtggctcaaacctgtaatcccaacactttgggtggctgaggcgggcagatcacctgatgtcaggagttcaagagcagcctggccaacatggtgaaacaccgtctcttcaaaagtacaaaaattagtcgggcatgatggtggatgcctgtaatcccagctgctcaggaggctgaggcaggagaattgcttgaagccaggaagcagaggttgcagtggaccgagatcgcgccattgcactccagcctgggcgacagagcaagactccgtctcaaacaaaaaaagctgttcatccctgtcatctatccaacttctttcccatctctgggctctaagtcttgccattttcctggtaggcaggaacttcatggccatggatgtgagctgtccaaacactcagaaaaaaagaatcttgactttcttctcttctttgacctcctttactctatttcagccaacattcccatagccccaccctaatccttgtcatcactctgaaatgtgaaacacagacatttcactctctgaccacaaccactaataccccaactcccccactgcttcattgacaatggcctgaggggtatactggccaactaggtcgttggttaaggttccgaagagtgcaaacactatagaaggtcaagtctccctcctattaaaagactttttttctaacattttgaaaacttttgttacatgtttacaaggaagtatttgaagaagagattacaggcagtttttctaatatttcataaagaaaaacaggtggggcctggcagtccaaagtggtgattaacagcatgaaatttactttcacagccaggcatggtagctcacacctgtaatcccagcactttgggaggccgaagtgggtggatcacctgaggtcaggagtttgagaccagcctgacaaacatggtgaaaccccatctctactaaaaatacaaaaattagctgggcgtggtggctggaatcccagctacttgggaggctgaggctggagaatcacttgaacccaggacacagagattgcagtgagccgagaccgcaccattgcactccagcctgggcaacgagagcgaaagagcaaagctccatctcaaaaagaaaagaaagaaagaaaagaaagaaagaaagaaagaaagaaagaaagaaagaaagaaagaaagaaagaaatttacagtcacacaagaccatactaagactctaccctcattagctgtggaatgcggaagcaagtcacttacaaccaactttgggggccttacctaactcatttgcaaaatggagatgataaagccaacctcacagtcttgcaatgaggagtttaactaagattatgctcataaaaagcttcccacagttctggggttttcttcaagcggataaatggagctgggctaggactgttttaatccaaacacagatgagcacaggaaaatatcagatgttgacatgtatgcaacatggcccacaagcctgcatacagacaccagaatgcacacatgagaacatccacatacttatatgtagtcacccaattgtgaatgcatacatacaaacatgaatatgcggcattcatcttgttttacacagaaatgcacatcatagacacccctaaatcatgtgtgcacacatgctgtatgcagagacagacacatagattggcaagcattgagaaacagtggcacaccctgtcaggcacacacacacatgtgcatgtgcagacataagttggaatggatacccattatcaagcacaaacatacaccccacaaagcctggtgcacacataaattcatgtatcaacatggacatacagaaacatacatgcacatagacactaccagaatgacacacagacagttgaataaatgaggataaacatggcagaggcatccaggagaactcactggacaaaatggcacaaaatacaaagatgcaggagcacacagggtgattgagggaaacattgacttgcagggaaggagaaagagaagatagaaagacaggatccaagacaacggtagacagacaggtgggcaaagtcctgtgcagggctccagggccaaccagaataacctgagagtctaatgctggcctgtccttccacagatactgcctaactcagcaccacactccaggaggccatgaaggattaatttcctattcacagctccatggagtaaagcttggctgtgctgaggaaggggtggggaaagaggttcccaaagactctgtccttttcctccttcccaaaggaaaagatctgtgagctttagactagagaatgtaaaagcaaggaatgtgtttagggaacatcttatccatccgcttcatcgtacagaggaaagagaacaactgctattcattgagcacttactgccatgtacctcacctgcattaacacatatacttctcccctaaatagctgaagaggtaagagctgttcttggctccataaggctcagagataaagtcagctattcaaggccacacaacaaagaagggataaggttaggattccaatccaggccttaatcattgcaccatccatccagaaaaggaaactgaggccaagcaaaggaaagggatcttcctgggttttccactaactcactctgaaaggctgtacccaagacactgcccactgggacaagtccctcccacatgatttcagacaccattctctcactccatgctccagggtaatcaacaagtccaaaattgattgacctctatgtccacaaacactagagttctccaaacctgtctctccccaccccctccctggccagatcatggcaacctgctgatcactcagtgcacttcctagtgccaacctcactgagaaacaaagttcccgaatttctatctcccacctttttaaggaactagaaggaaaaggaggagcccaggcttagggccagcccaggtgcaggctggtgaccaggattagagggattgatatctgccaagctggtgctaatcctccttcccacctcttcccctccaaaatcaacaaacaactttcctctgtcccctttgttctctgatctttgttccctccacacaggtctcagagctcagcatcctagaacactttgagcaagatgtcagtcctgggggggccaacctcacccacctccacttgtccacagttggtgacccagaggagaggtgcaacagtggaaggtccaaacatcagagcctgtcctgtgcccatctggagcccctctcagggtctggctgaggctcatctcagacccacataggaccaatatcaacacctgcctcatgctcatgtcagagcccactgggaccaacctcagaccctatatggtgccactcttatgccctcctgaagcaggactctcttatgccctcaatgacacctgagacaacacacagagccctcttggcaccaaacatgacttcaatattctcctggtgtcaagttcagtgccaacttgtttcccatcctcgcatacacctgggggcagtcccaaagccaacacgatgcctttccctccctggacacacctgatgctgatatcagaacccgccaatgtcatcagtgtgtccactgctgatgccagtcccagcactcacctcctgctaagcctggcctgcacttgactcccagggtgatctaggccagtcaatgaaggggggcgaggagaaagttcacatcccagctccctcacttactccctgtgtgacctcactcaagaggatttatggagtctagatctgctcatcttcaaaatgaggatgatcatgatgaaccaacctcactgttacaaagattcaaccagatcatacacacctagacttaatcttcccatatatgaccatgctcaccaaagggtaactgtcctgtttactaaggaagaatttccttgagggaaggacaggagggctactcatcccttctccactcacacccaccccaggatctgcctctgtgcctaatactggagtttaccccaatctcttctgcgattgttccctctgcctactaatagtagtagcccctgacaaagcaggaatcgcccttaaaggagacttaactcaccctcaaacgtggtcttctcttcccaaacactccctttccactggcaggaaaaccaaatccagaaagtggaactaaagacgcagagcaagagagatgggagttcagggccactcacacatgtcccctgcccactgtctgttttctgtcctctgtagatctttatataaaatgagaaacataaataacaatcatagtattaatagggatgatacaatcaatctagtgggtttccctaagaatctgggttggaaaccagtggagttcttcgtaaattacaacccttgggacacttgagatttttccagcatttgagggttgttattactatttctccagacctagccaatcccctctgccaactggtaacatgaggtactcttctccacgtgtggggaaagttcctctgaaatatggctctcgtcttctgcccctttcccagccagagatgggcagcggaggttctatggcacccatcctggcctcactctgaggttccaatgaggattctgggcatcaagagacagctctgggtcaaagcaaaatcaagtcagtccctgggcccagtgctgggctgctgggctttctgggagcacctgctgggcttgctacacactccacctcccagaaactccacacccacagccctgggtcttcctagccccaagactttcaagtccatatgcctggaatcccccgtcctgagacccttaaccctgcatcctccacaacagaagacccccagatgcacagccacacttccatctcaccctagtaaaacccagacctttggattcctctcccgtggaatgcccaaatccacaactttggggtgcattctcactcccagatcccaaatccaaagtccaggtgctcccctgtgcaaatattccaaactcctcagttccacagtttatctgttgcccgctcctaaatccacagccctgcagcaaccctcctgaagtaccagatttagtctggagttcccctccctgttcagcttccctggggtccctctcctcctcccttgctggctgtgtcctaagctgtgtgggattcagggttggggtgtagttgggaggtgaaatgaggtgattatataatcaaccaaagtccatccctctttttcaggcagtataaaggcaaaccaccccagccatcaccatctatcatcccactgccaccatgctggcctcagggctgcttctggtgaccttgctggcctgcctgactgtgatggtcttgatgtcagtctggcggcagaggaagagcagggggaagctgcctccgggacccaccccattgcccttcattggaaactacctgcagctgaacacagagcagatgtacaactccctcatgaaggtgtcctaaggcagggagatgggtggcacggggtgggggctgcccagttggctggggctttgtggcaggggattgaccagtgtggaccagagtcttaggaaagggagtcttggagtttcagcatcagggtcctagcaggaaagacaggatcttgggatgtccagctccctgactgtgagaacctgggggcgaagcatcccagtacatgatatctcagtgctgggcccattcagagtgggggctgctccctctaaccactcccacctgcctccaacagatcagtgagcgctatggccctgtgttcaccattcacttggggccccggcgggtcgtggtgctgtgcggacatgatgccgtcaaggaggctctggtggaccaggctgaggagttcagcgggcgaggcgagcaggccaccttcgactggctcttcaaaggctatggtgagggggtgcccaagagggggaaggtggccaggtggatgcaatggtctccgtgtccccagccttctccctgactctcctgcccactggaggctatggcagagccccctgtctggtcttctctccccatctcccttcatcgtggcctctccctgtgcgtccctcacctgtctccagcgtccctgtcgtgattcctccctgcctctctctgccccgtctcctccttctctctcactggagtctcctctttcccctctctctccatctctgaggacatcctgggtttctgttttccagccctggtcctctgtcttcatttgtctttttgtcgctctcggcttctgtgcttctccgtgtttctcctctctctgcttccctctcccacttcttcctctgtcttaggatttcagggtattcctacttccacatctccagcctccaactcctggtaattgtctgtcctccttcccgatcctctctgtttctgtctccatatttttctctcttctccagttcagcttaagaatctttcaccatttttatttcctcctcccagatctccccatatctcacttcccctccctccatctctctctttctctccccacttccttcccttcctccatggagtatccccgtatccctctgtttctctgcatctgtctgtctggcctttctgcttctcttctgattctcttattctttctacccggtctctctctctctctctctctctctctctctctctctctctctctctctctctctctctctctctctcgtgctctcgtgtttctctgactgagtttgcagctctcctgggcactcgcgctgaatccatctctctcccaccccactccctctctgctccacccttggggagccccttggagctggtccgctcctgctcccgccgccccctgacctctctccacccccgcgttcacctccccaggcgtggcgttcagcaacggggagcgcgccaagcagctccggcgcttctccatcgccaccctaaggggttttggcgtgggcaagcgcggcatcgaggaacgcatccaggaggaggcgggcttcctcatcgacgccctccggggcacgcacggtgagtaggggaccccgagtgcgagggcgggaacccgcgctttctgcctggggatggggactaggtggggaaaggggcccgcacttccagccctggagtctggcgctgggattcggctcaacagggccctgcctcctggaattctgactctcctcagacctctgagttgactctctccccaacccccttctcccgccacacctgcaggcgccaatatcgatcccaccttcttcctgagccgcacagtctccaatgtcatcagctccattgtctttggggaccgctttgactatgaggacaaagagttcctgtcactgttgcgcatgatgctgggaagcttccagttcacggcaacctccacggggcaggtaactggctgcagcccgccagtgacgcccctaccacaacctgccaactgctcccctacctggagacaggtgccccaaactcccacccccctccagacagtgtcccctcaaaatcagtccccgatattggacaactggacggttgcaccagaacccaggagggatgcccaatacccagtctccaaggacacctggatagctcaacagatgatccccaaaacagagcctgctggcaggatgcataccctcagctcagctctctcacctgggcacatgttcccatccccaacttaccgtaatttgtaacaggtgctccctacccagttcttctgaatattttaacacctggacaagtgactgcgtcaacccgcctcctgcatacctgaacacctggtgctgcaaaatccagcccatcataatcatttcacatctacacaaatgtcacagattagcccactggaatatctggccaagggccctctacttcacccacttaaatgcctgaaaacatggacaggtgccctaaccaataccctaaacacataaatatctagatagattattccctgacacccaaataagtgttccccaaccctttccaatcacacaccttacagaggtgctcccagtgcatcccacttggataggtaaacacctcaacaggtatcccctccacttcaacatcttcaccagccccactttaatacctgaacacctgaacaaaagcccccaatccagacccagtaagtatctggacagctgtctccaaccaagtccacttgaatgcctaaatacctagacaggtgccactcacctcataccagccccacctgaagagctaaacacctggacaggtgtcttccaactcaacttcacttgaatatctgaacacctagatgtgtgctccaatccagcctcatttgcatacctgaaacctggatatatgcctcagttcttctcacctaaattactagaccgtggccctggcacctaatccacgtgaaaacttagatataagtttccatccaaccccactgaaatacctaaacacctggacagatgcctttaactccgttccttccttgctatgaaacaaatccccattcccatcagctcctgccccgtgacagctgtccttcccttcccatcctctctctgcaaccccagctctatgagatgttctcttcggtgatgaaacacctgccaggaccacagcaacaggcctttaaggagctgcaagggctggaggacttcatcgccaagaaggtggagcacaaccagcgcacgctggatcccaattccccacgggacttcatcgactcctttctcatccgcatgcaggaggtacatcccagcagccagtgcaggcaggtgcaaagccagggagagggaaatcaggatgggagtggggtgggcagacgacacaggcccattcaaattagccctcgtcataataatccttacaattggccaggcgcggtggctcatgacctgtaatcccagcactttgggaggccgaggcaggtggatcacctgaggtcaggagttcgagaccagcctggccaacatggtgaaaccccgtctctactaaaaatacaaaaatgagctaggtatggtggcatgcgcctgtaatcccagctactcaggaggctgagacagaagaattgtttgaatccgggaggcagaggttgcagtgagccgggatcatgccactgcactccggcctgagtgacagagcaagaccctgtaaaaaaaaaaaaaaaaaaaaaaaaaaaaaaatcctgacaatcccaactacatcaaccactgctgttccatctactgagccctcacccacaagcacgacttatgcacgtgcattagaatagcaagcacttctacagcactaccgtgtgccaggcactgcgttaagtgctttaagatagtccgccatggaacacttataacagctcttgaaggaggttcaatcatggccccaattgtacaaatgaggaaactgaggcccagagagtttaagtgtcttaactgaggtcacacagtgaggaagccatggtcccccaagctcaaaccctggtctctctgagcctaaagctggtgcttttagccaccatgctctctaaccgttcatgtcctggttagcagacacacctctgtggacaggtgacctggctttacattgcagggtccccgcctacctctggatgtcagcctcccatgtgggaaggctttagggaatccaaagctcagggagaaaggatcaagggagggattcctccacagtaagtttcaagatttttagggaagaaataggatgctgttgcttaaaattctgtgcttgtatctcagaaaaactctttttttctgactcttcatcttgccatctctgtactactttctcttcgtctcccctcatccttctctttccaaatattcctatcattaaaaaagtaacagactgggaaacatggcaaaaccccgtctgtacaaaaaaatggctaggcatggtggtgcatgcctgcggtcccagctactaaggaggttgaggtgggaggatagcttgagcccagggtgggcagaggttgcaatgagccgatatcacagcactgccctccagcctgggtgacagaataagaccgtgtctcaaaaaaaaaaaaagaattaattttttaacagttaacaagtgagcctgcatagtcatgtgcatgtgcagttccagctactcaggaggctgaggccggaggattccttgaacccaggagttggagtccagcctgtgcaacttagcaagaccaagtctgtataagaaaaaaaaaaaaccaactgacagctaagttgacaattaaaggatagatgatcagtgaggtaaagaaggtgagaaggaagagcattttgggcaaagccagcagccagggcaagggctggaacctggagcgagtttggcaaatctagggtccctctttccacctttggtctggaccaaagagaggtagctccaaaggaaaagccctagaagggccccaagagcatggagagtgagcttggtctaaaccgccctctccctgcaggaggagaagaaccccaacacagagttctacttgaagaacctggtgatgaccaccctgaacctcttctttgcgggcactgagaccgtgagcaccaccctgcgctacggtttcctgctgctcatgaagcacccagaggtggagggtaagactggaaagggaggaaagtgaagggccccagaccctcaaaactcccctgagcctggtgcagtgtacccacctatcccagatcccaggaccctgagacgtgccttgctgtccagagacaggacaatattcagctgataggcatcagctgagtctcattagctattaaaatattgaaaatgtctgcactgattggtcagtcactcctgtcccaagcccactgagtgtccgctgcctgctcctctggatcatcccctaagttcctccctgtgcctaccctgtgattctgacacaacctggtttaacaggatcctgctgcaacaatgcgaatggctgatgtctgttctgttatgaatggtctacctccgtgtcataggtggagctatgtcaaccaccgtgttttacctattcggactatcatccctgctctaagacccctagacacctaaacacattcccctcctcccccagccaaggtccatgaggagattgacagagtgatcggcaagaaccggcagcccaagtttgaggaccgggccaagatgccctacacagaggcagtgatccacgagatccaaagatttggagacatgctccccatgggtttggcccacagggtcaacaaggacaccaagtttcgggatttcttcctccctaaggtgctgtctcccctccaccaccaccactcagactacggggacttccagcctctctctgtgtccccagaatcctgcccccattagtgttctagactctgtcccactccctcaatcagtcaaaaaagacttccccaaccaccacatctgttccacctttccacttagacagtcctgagtcctgcatctcgccagactctttgtgtcaggagaatacaccccatgttcccaaacttcctgtcttaagaaacagaagccccctttccattaggccttttgccttagggacacaaatctcaggtccctcaaacaccctgcctagtggaacatggaccccatgtctcccaaacttcctgtttcagagacatgaaacttctatcccccaaagctcctccctcagaggtccccaactcctccatgcctgccactcccctcacctggggcaccctagttccccctgcagcccctgtgtactttcaccaatccccccaacctgcctcattacacacaccttcctcctccctcccagggcactgaagtgttccctatgctgggctccgtgctgagagaccccaggttcttctccaacccccgggacttcaatccccagcacttcctggataagaaggggcagtttaagaagagtgatgcttttgtgcccttttccatcggtaagagaccactgtttgctgccaggccacggctcacaccagcaggggcctctctcacccacctcccctctctgcggtgtagcctggtatttctccagcttggaagttcctgttagaatctaccattgagccgccaccagctgatactcccttaactgccaagcacccaatacctgcgcccaggtaaaagggaaggaaacatcttcccccatagatttatttgtctagggtcacacagcagattcttcagctccctgaaaaggagataatggcacagcacagcagtcatatttgcaagtgtatctggggggtaggggcatctaaacctcccattgctacacctggcatggatcaccccatctatgatggaggcatgacattatgcctttttcaaaacccatagaactgtataacacagagtaaaccctaatgtaaactatggactttggttagtaataatatatcaatattggttcaccattgttatatctcttatagaaggaaactgaagctcagggaggatcggagtctcctctgaaagtctctcaggccataatattccacccctcctccctagagagtgcagccgggggtcagtaggggttgaggctgcactgagagtgggcttcaccttcacccctcctgcctctcctcctcaggaaagcggtactgttttggagaaggcctggccagaatggagctctttctcttcttcaccaccatcatgcagaactttcgcttcaagtcccctcagtcgcctaaggatatcgacgtgtcccccaaacacgtgggctttgccacgatcccacgaaactacaccatgagcttcctgccccgctgagcgagggctgtgctggtgcagggctggtgggcggggccagggaaacggccggggcaggggcggggcttgtgggaggggcggggctaagaatgggggcagtgggggaaggaaggggagaggtggttagagggaacagaagaaacagaaggggctcagttcaccttgatgatgtccttcagagctgtgatgagaggaagggaaaccttacagtatgctacaaagagtagtaataatagcagctcttatttcctgaacaagtacctccgtgtcagctttgttcaaaaagcgttgcacgctcacctcacttaattgccacaaacctctacgaaggggaaaagcgttcatgcccattttacacgtgacaaagctgcggctcagaaagttgtctctatctgatttctcacaaaacgtaagtgcccagaaaatctttgaacacagatctgtgcccatagccctctagatagattcttaaaaagcaccccttcctcacgtaaaatagcttagtatagcatcacatggcctgaacatccctgtcctggggggttttccagagacctggcgggcggctgtcctgccttctctgcacactttcctactcggcacgctttgaacaccagggtgtaatctgagctcgctaccaggtaaggccactgtggcccaatcagagtcagtctaggacacaacgagacatgaatggacatacagagtcagtccattgacaattcctttgcagagcagaagtttttaattttaatgacattctgtcattgtatctcttaatgaagaagttgaaggagagaaccactttaatgccgggagaactctggatcaggacataccatacgcatgtttgtgatcatgtgcaggcatgcatgtgagcatatgactgcatattctcctccgtgtatgcatgaaacacattccactatgggtttctgaaggtggggctctcctgatggatctggggtctgttgtaagacccagctaagagtttcacaatcacctgcccactctcaaagacgttagtgtgtgtcccccttagaagctcccttacagcattcacgaaaattaactccaagtttattgtagacctaaatgaaaagtgagtataaacttctagaagataacgtaggagaaaatctagatgaccttaagtttggtgatggcttattagatacaacaccaaaagcacaatccttgaaagaagcaattgataagttctgagtcattaaaataaaaaatttctgctctgcaagataattgtcaagagaatgacaatacaagctacagactgggagaacatatttgcagggaacatacctgataaaggacttacattcaaaatacacaaagaactgttaaaactcaacaatagaaaacaacccaattaaagaatgggcaaaaatctgagcagacacctcaccaaataaaatatacacacagcaaataagcataaggaaagatgctccacatcatgtcagtagcaatttcaaatttaaaaaataatgatataccgttacctacctattagaatggctaaaatccgaaactgacaacaccaaatgctgacaaggaggtggctcaacaggaactgtcattcactgatggtgggaatgcaaaatggcacagctactttggaagacagattggtggtttcttgcaaagctaaacatattttcactatgtgatacagcaatcatgctcttctgtattaacccaaatgaattgaaaatgtatagccacacaaaaatttctgcacagatatttatagcagctttattcatagttgccaaatcttctaagcaaccaagatgttcttcaataagtgaatggataaatgaactgtggtatgttcatacaatgaaatatggctgggcgtgatggctcatgactgtaattacagcactatgggagaccaaggtgggcagatcgtttgaggtcaggaattcgagaccagcctggccaacatggtgaaaccccatctctactaaaaatacaaaaactagccgggcatggtggcatgcacctgcagttccagctacttgggaggctgaggtgggagaattgcttgaacccatgaggcagaggttgcagtgaactgtgatggagcctctgcactccagcctaggtgacacagtgagactttgtctcaaaaaacaagcaaaaaaaaaaaattatttggcaatacaaagaaatcaggcctcagaaagacatggaagatctgaaatgtatgtagctaagtgaaaaaagccagtctgaaaaggccacatcctatataattccaactatatgacattctggaaaaatgaaactatgaagacagtacaaagatagtagttgccaggagtttagggaggaggaagtatgaataggtgcagcacatgtggtttttagggcagataaactattctgtatgatactgaaatgctacatgacattatgccttattcaaaacccatagaactgtacaacagaaaaaataaaccctaatgtaaactacagactttggttcataataatatatcagtattgattaatcattgtaacaaaggtatcatacttacacaagatgtaaggtatataggaactttcttccattccaagatggatgaatagaagcaactccagtctgcagctcctagcatgatcaacacaaaagatgagtgatttctgcaattccaactgaggtacctagttcatctcactgggactggttggacagtgggtgcagcccatggagggtgagccaaaacagggtggggtattgcctcacccgggaagtgcaaggggttgggagatttccctttcctagccaagggaagccgtgacagagtgtacctggaaaactggaacactcctgcccaaatactgcgcttttccaatggtcttagcaaatggcatgccaggagattatatcccatgcctggctcggcaggtcccatgcccacagagccatgctcactgctagtgcagcagtctgagatcaaactgtgaggcagcagcctggatgggggaggggtatccaccattgctaaggtgtgaggaggtaaacaaagcatacagggaagctcgaactgggtggagcccaccggagctcagcaaggcctgttgcctctgtacattccacctctgggggcagggcataactaaacaaaaggcagcagaaacttctacaaacttaaacatccttgtctgacagctctgaagagagcagtggttcttccagcatggtgtttaagctctgagaatggacagactgcctcctcaagtgggtccctgacccccatgtaacctaactgggagacacctcccaggaggggctgactgacatctcatacacacaggtgggtgcccctctgggatgaagcttccacaggaaggatcaggtgccaatatctgctgttctgcagcctccactggtgatacgcaggaaaacagggtctggagtggacctccagcaaactccaacagacctgaagctgagggaactgactgttagaaagaaaactaacaaacagaaaggaatagcatcaacatcaacaaaaaggacatccccaccaaaaccccatctgtaggccaccaacatccaagaccaaaggtggaaaaaccagagcagaaaacctgaaaattctaaaaaccagagcacctcttctcctccaaaggattgcagctcctcaccagcaatggagcaaagctggacagagaatgactttgatgagctgacagaagtaggcttcagaaagtcagtaataacaaacttctttgagctaaaggagcatgttctaacccattacaaggaagctaaacatcttgaaaaaagactagatgaatggctaacgagaataaacagtgtagataagaacttaaatgacctgaaggagctgaaaactatggcacaagaactacatgacacatgcacaagcttcaatagccaattcaatcaagtggaagaaagggtatcagtgattgaagatcaaattaataaaataaggtgagaagacaagattagagaaaaaagagtaaaaagaaatgaacaaagcctccaagaaaaatgggactgtgtgaaaagaccaaatctacgtttgactgatgtacctgaaagtgatggggagaatggaaccaagttggaaaacacccttcaggatataatgcaggtgaacttccccaatctagcaaggcaggacaacattcaaattcaggaaatacagagaacaccacaaagatactcctcgagaagagcaaccccaagacacataattgtcagattcaccaagatggaaatgaaagaaaaaatgttaagggcagtgagagagaaaggttgggttacccacaaagggaagcccatcagactaacagcagaactctcggcagaaattctacaagccagaagagagtgggggctaatattcaacattcttaaagcaaagaattttcaactcagaatttcatatccagccaaactaagcttcagaagtgagggagaaataaaatcctttacagacaagcaaatgctgagagattttgtcaccaccaggcctgctttacaagagctcctgaaggaaccactaaacatggaaaggaacaaccggtaccagccactgcaaaaacaggccaaattataaagaccatcaaggctaggaagaaattgcatcaactaacgggcaaaatacccagctaacatcataatgacaggatcaaattcacacataacaatattatccttaaatgtaaatgggctaaatgcctcaattaaaagacacagactggcaaattggataaagagtcaagactcatcagtgtgctgtatttaagagatccatctcacgtgcagagacaaacataggctcaaaataaagggatggaggaagacctaccaagcaaatggaaagcaaaaaaaaagcagtggttgcaatcctagtctctgataaaacagactttaaaccaacaaagatgaaaagagacaaagaaggccattacataatggtaaagggatcaaatcaacaaaaagagctaactatcctaaatatacatgcacccaatacaggtgcatatatatttatgcacctagattcataaatatgcactagattcataaagcaagtcctgagagacctacaaagagacttagactcccacacaataataatgggagagtttaacaccccactgtcaatattagacagatgatcgagacagaagcttaacaaggatatccaggaattgaactcagctctgcaccaaatggacctattagacatctacagaactctccaccccaaatcaacagaatatacattcttctcagcaccacatcgcacttattccaaaattgaccacatagctggaagtgaagcactcctcagcaaatgtaaaagaacagaaatcacaacaaactgtctcttagaccacagtggaataaaattagaactcaggattaagaaactcactcaaaaccgcacatctacagggaaactgaacaacctgctcctgaatgattactgggtacataacgaaatgaaggcagaaataaagatgttctttgaaatcagtgagaagaaagacacaatgtagcagaatctctgggacacatttaaagcagtgtgtagagggaaatttatagcactaaatgcccacaagagaaagcaggaaagatctaaaattgacaccgtaacatcacaattaaaagaactagagaagcaagaacaaacacattcaaaagctagcagaaggcaagaaataactaagatcagagcagaactgaaggagatagagtaacaaaaagcccttcaaaaaatcaatgaatccaggagctggttttttgaaaagatcaacaaaatatatagaccactagcaagactaataaagaagaagagagggcagaatcaaatagatgcaataaaaaatgataaagagtatatcacaaccaatcccacagaaatacaaactgctatcagagaatactataaacacctctatgcaaatacgctagaaaatctagaagaaatggataaattcctggacacatacaccctcccaagactaaaccaggaagaaattgaatctctgaatagaccaataacaggctctgaaattgagaaaataattaatagcctaccaaccaaaaaaagtctaggaccagagggattcacagccgaattctaccagaggtacaaagaggagatggtaccattccttttgaaactattccaatcaatagaaaaagagggaatcctccctaagtcattttatggggccagcatcatcctgataccaaagcctggcagagacacaacaaaacaagagaattttagaccaatatccctcataaacattgatgcaaaaatcctcaataaaatactggcaaactgaatccagcagcacatcaaaaagcttatccaccacaatcaaacttcaccacaatcaagggtgaaccagccttggcttcatccctggaatgcaaggctggttcaacatacacaaatcaataaatgtaatccatcacataaacagaaccatcgacaaaaaccacatgattatctcaatagacacagaaaaggccttcaacaaaattcaacagcacttcatgctaaaaactctcaataaattaggtattgagtgaacatatctcaaaataataagagctatttatgacaaacccacagccaatatcatactgaatgggcaaaaactggaagcattccctttgaaaactggcacaagacagggatgccgtctctcaacactccttttcaacatagttctggccagggcaatcaggcaagagaaagaaataaagagtattcagttaggaaaagaggaagccaaattgttcctgttcacaaatggcatgactgtatatttagaaaaccccaacatctcggggagcgcctctgccccgccgccccatctgggatgtgaggagcgcctctgcccggccgagaccccgtctgggaggtgaggggcgcctctgcccggccgcccctactgggaagtgaggagcccctctgcccggccagccgccctgtccgggagggagctgggggggtcagccctccccccggccagccaccccgtctgggaggtgaggggcgcctctgcccggccgcccctactgggaagtgaggagcccctctgcccggccagccgccctgtctgggagggaggtggggggatcggccccctacccggccagccgccccatccgggagggaggtgggggggtcggccccccgcccggccagccgccccgtccgggagggaggtgggggggtcagccccccacccggccagccgccccgtccgggagggaggttggggggggtcagcccccctgcccggccagccaccccgtccgggaggtgaggggcgcctctgcccggccgcccctactgggaagtgaggagcccctctgcccggccagccgccccgtccgggagggaggtggggggggtcagccccccgcccagccagccgccccgtccgggagggaggtggggggggtcagcccccccgcccggccagccgccccgtccgggaggtgaggggcgcctctgcccggccgcccctactgggaagtgaggagcccctctgcccagccagccgccccgtccgggagggaggtgggggttcagccccccgcccggccagccgccccgtccgggagggaggtgggggggggtcagcccccctgcccggccagccgccccgtccgggaggtgaggggcgcctctgcccggccgcccctactgggaagtgaggaacccctctgcccggccaccgccccgtctgggaggtgtgcccagtagctcattgagaatgggccaggatgacaatggcggctttgtggaatagaaaggcgggaaaggtggggaaaagattgagagatcggatggttgccgtgtctgtgtggaatgaagtagacatgggagacttttcattttgttctgcactaagaaaaattcctctgccttgggatcctgttgatctgtgaccttacccccaaccctgtgctctctgaaacatgtgctgtgtccactcagggttaaatggattaagggcggtgcaagatgtgctttgttaaacagatgcttgaaggcagcatgctcgttaagagtcatcaccaatccctaatctcaagtaaccagggacacaaacactgcggaaggccgcagggtcctctgcctaggaaaaccagagacctttgttcacttgtttatctgctgaccttccctccactattgtcccatgaccctgccaaatccccctctgtgagaaacacccaagaattatcaataaaaaaataaataaataaataaataaataattaaaaaaaaaaaaaaaaaaaagaaaaccccaacatctcagcccaaaatctctttaagctgataagcaacttcagcaaagtctcaggatgcaaaatcaatgtgcaaaaatcacaagcattcttatacaccaataacagacaaacagaaagccaaatcatgagtgaacgcccattcacaactgcttcaaagagaataaaatacctagaaatccaacttacacgggatgtgaaggaccttttcaaggagaactacaaaccactgctcaacgaaataaaagaggatacaaacaaatggaagaactttccatgctcatggataggaagaatcagtatcgtgaaaatggccatactgcccaaggtaatttatagattcagtgccatccccatcaagctaccaatgactttcttcacagaattggaaaaaactactttaaagttcatatggaaccaaaagagagcccacattgacaggacaatcctaagcaaaaagaacaaagctggaggcatgatgctacctgacttcaaactatactacaaggctacaataaccaaaacagcatggtactggtaccaaaacagagatacagaccaatggaacagaacagaggcctcataaataacaccacacatctacaaatatctgatctttgacaaacctgacaaaaacaagaaatggggaaaggatccctatttaataaattgttctgggaaaactggctagtcatatgtagaaagctgaaactggatcccttcctggcaccttatacaaaaattcactcaagatggattaaagacttacatgttagacctaaaaccataaaaaccctagaagaaaacctgggcaataccactcaggacataggcatgagcaaggactttatgactaaaacaccaaaagcaatggcaacaaaagccaaaatagacaaatgggatctaattaaactaaagagcttctgcacagcaaaagaaactaccatcagagtgaacaggcagcctacagaatgggagaaaagttttgcaatctacccatctgacaaagggctaatatccaaaatctacaaagaactcaaatttataagaagaaaacaaacaaccccatcaaaaagtgggcaaaggatatgaacagacatttctcaaaagaagacatttatgcagccaacagacacatgaaaaaatgttcattttcactgatcatcagagaaatgcaaatcaaaaccacaatgggatactatctcacaccaaagtcaggaaacaacagacgctggagaagatgtggagaaataggaatgcttttacacttttggtgggagtgtaaactagttcaaccattgtggaagagagtgtggcgattcctcaaggatctagagctagaaataccatttgacccagcaatcccattactgggtatatacccaaaggattataaatcatgctactataaagacacatgcacacgtatgtttattgcggcactattcacaatagcaaagacttggaaccaacccaaatgtccatcaatgatagactggattaagaaaatgtggcacatatacaccatggaatactatgcagccataaaaaaggatgatttcatgtcctttgcagggacatggatgaagctggaaactatcattctgagcaaactatcgcaaggacagaaaaccaaacaccgcatgttctcactcatgggtgggaattgaacaatgagaacattgggtcacagggtggggaacatcacacaccagggcctgtcgtggggtgggggcctggggaagggatagcattgggagaaattcctaatgtatatgaggggttgatgggtgcagcggcccagcatggcacatgtatacttatgtaaggagcctgcacgttgtgcacatgtaccctagaacttaaagtataatttttaaaaaaaggatcgagaattagagttacataagaggagtaagttcaagagatctactgtacagcatggtaactatagttaatgatgatatatcgtatttttggaaaatgcaaagagagtggacattgagttcacactacacaaatgacaattatgtgagataatgcatttgttaattggataaatttaactatttcacaatacttatacttcaaaacatcatgttgcacacaatacaataaatacatttttttgagataggtcttgctctgttgcccaggctggaatgcagtgctaccatcatggctcactgcagcctcgacctcccaggctcaagttatccccccacttaaaccctcaagtagctggaactacaggtgtatattcagttttttgtgcttttatttatttatttttgtgggtacatagtaggtgtatatattgatggagtgcatgagatgttttgatacaggcatgcaatgtgaaataagcacatcatggagaatggggtatccatcccctcaaacatttatcctttgagttgcaaacaatccaattacattctttaaattattttaaaatatacaattaagttattattgactacagtcgccctgtggtgctatcaagtagtaggtcttattcattctttctaacaatttttcgtacccattaaccatccccaccttccccccagtcctccactaccctttccagcctctggtaaccatcttctactctgtgtccatgagttcaattgttttgatttttagatcccacaaataagtaagaccatgcaatgtttgtctttctgtacctggcttatttcacttgacataatgatctcctaatttcttttttgagtccattcaattctagaacatctccttattttttaaactattttgtagacacaaggttttgtcatgttgcccaggctggtctcgaactcctgagctcaagtgatccacccacctctgcctcccaaagtgctgggattacagatgtgagccaccgcgcccagcatttttttttctttgtttttgtcttttatctcacctgggacccatgagattcatttttaaatactcaagttaaaaaggggagatggaggtggaagaagacatgaaacaagattgtttgtgtgttgaaaacctctgggtgatgtgtacatggatcctattttctctccttttttttttttttttttggacagagacttcctctgtcatccaggctgtcatgtcatccatggcacctggccactctatttttatagaactttgaaaattgccaggcatgatggctcatgcctgtaatcccagcactttgggaggccaaggcgggtggatcacctgaagtcggtagttcaagaccagcctgaccaacatggagaaaccccatctctactaaaaatacaaaattagccaggcgtggtggtgcatgcctgtaatcccaactactcaggaggctaaggcaggagactcgcttgaacccaggaagcagaggttgtggtgagccaagatcgtgccattgcactccagcctgggcaacaagagcgaaactccatctaaaaaaaaaaaaaaaatttcaaaattagccaggcatgatggtgcatgcctgtaatcccagctactcaggaggctggggcagaataattgcttgaacccaggaggccaagattgcagtgagccgagatcataccattgcactccagcctgggcaacaagagctaaactctatctcaaaaaaaaaaaaaaaaaaacttggtaataaaaaggttaagagaaatgaagaataaagaggatcagagaatggagcaggaattgaaggatgacatggggtcaagagaaggtctggcattctcatatacgtctcagggaaatgtaaattgataaaccacttggaagagctgtttggcagtacccactaaggctaaaatataccttatcctatggcccaacaataccaaaaataactgaatgcacagattacaaaacgccttgtatgagaatattcaggccaggcgcgatggctcacacctgtaatctaagcactttgggaggctgaggcgggcggatcacttgaggtcaggagttcgagaccagcctggccaacatggtgaaaccctgtctctgctaaaaaatacaaaaattagctgggcatggtggcatgaacctgcagtcccagctactcaggaggctgaggtgggagaatcactagaacccaagagggagaggccgcagtgagctgagatcatgccattgcactccagcctacacgacagagagaaagcctgtctcaaaaaataaaaataaaaaagaatgttcagagcagcttatagccaaaaactggaaacaaatcaaatgttcatcaacaggtgaatggataaagaaattatggtatattcatacagtgaaatacattagcaagactggcacagtggctcatgcctataatcccagcactttgggagactgacacaggcaaatcatttaaggtcaagagttcaggaccagcctgggcaacatagtgagactccatctctaaaaaaataaaaaacaggccgggcgcagtggctcacgtctgtaatcccagcactttgggaggcctaagcgggcagatcacgaggtcaggagattgagaccgtcctggctaacatggtgaaaccccgtctctattaaaaatacaaaaaattagccgggtgaggttgcaggcgcctgtattcccagctactcgggaggctgaggcaggagaatggcctgaacccaggaggcggagcttgcagtgagccgagatcgtgccactgcactccagcctgggcgacagagggagactccgtctcaaaaataaataaataaatgaataaataaataaataataaaaataaaaaacaaaaaaagtagctgggcatggtggtacaggcttatagtcccagctaattggggtgccaaagcaggaggatcacttgagctgaggaggtaaaagaaagagggaaggaaggaaggaaggaaggaaggaaggaaggaaggaaggaaggaaggaaggaaggaaggaaggaaggaaggggcaatacctaccattataccatttctggtgcgtgttttttaatagccatcctaatgaacacgaagttatatctcttgcttttgatttttatttccctagatggctagtgattttgaacatcttttcataaaagggtctttttaagatgggagaaatacagcttattggggttttttgtttgtttgttttgttttgttttttgagacagagtctccctctgttgcccaggctggagtgcagtggtgtgatctcggctcactgcgacctctgcctcccgggttcaagcaattctcctgcctcagcctcctgagtagctgggactacaggcacacaccaccatgccaagctatttttgtatttttagtagagtcggggttttaccatgttggccaggctggtcttgaactcctgatctctattgatctgcccatctcagcctcccaaagtgccgaattacaggcatgagccaccatgcccggccagcttattggctctttatgaaaaatattcaatagagagaagaaaacaaatcacacaggaaatgaaaacatgacacagccactttggaaaagagtttggaagtttcttataaatatacactcatcatagaacccagcagtcacactcacagatatatccagatacacgaaacatagatccccacaaagacatatgcatatatgccaagaataatacatattattcaaaatagccagaccttgggaacaatccacatttccatcaactggtgaaaagcaaattgtggcacatctatatgcggtgacatgctactctgcaatgaaaaggaatgagcttctgatgtatgtaacacatggttaactctcaaaagcattacgtatgcttcccagaagcaggcttggtatatggaagaaatgctgtagattttcttttcttttttttttttttgagacggagtctcgctctgtcgcccaggctggagtacagtggcatgatcttggctcactgccacctccgcctcccaggttcaagtgattctcctgcctcaggctcccgactagctgggattacaggcaccctccatcaagtccagctaatttttgtatttttcatagagagaggggttcaccacgttggccaggctggtctcaaattcctgacctcaggtgatccacccgcctcagcctcccaaaaagctaagattacaggcgtgagccaccatgcccagccgtagattttcatttatatgaaatgtagatcaatagtgggaagaaaaaactagaacagggctggatgcagtggctcaagcctgtaatcccagcactctgggaggctgaggcagaaggattgcttgagcccaggagttcgagatcagcctgggcaacatagggagacctctgcctctacaaaaaatttttaaattagccagttgtgatggcacaggcctctacttccagctactcaggaggctgaggccgggggatcatttgagccagggaggtcaaggttgcagtgaacaatgatcacaccactgcactccagcctgggggacagagcaagaccctgtctcaaaagaagagaaaaaaacctagaacaatggttgcccacaagagatggagcatggttgactaggaaggagtaggaaggagggttctcttttcattattattattactttagagaagggagtctctctttgtcacccaggctggagtgcaggggtgtgttcatagctcactgtagcctggaactcctgggtgcaagtgatcttccacctcagccccttgagtagctgggattacaagcgtgcaccaccacacttagctattgtttttttcttttttttagtagagacaggggtctcgcaatgttgcacagcctggtctcaaatttctggcctctagtgatccttccacctcagcctcctatagctaggattataggcacaaaccaccacgcccagctccaagagaactttcttggatgatgaaaatattctgtatcttcacagggatttcgataccttcaaaattcagcaaatgttcacttaccatgtgtgtatttcatcacaggtaaattttacctaaagaaatcgttaagggaaaactccatctacacaccttcacaggaactatgacacagtaaatagaatcaagtcctccagttggcgatggaatgggatctggcacaccagaagggggctcacctaagcctgacatgggacactgtgtggttctagcaggaaggaaggctgcatgtgccgtccagatgccagtgggcaagaggacaggatgatggaggatgcgcccgcttactgcccattgctgccattctctccgtgagataagaagcgggttcatcaacaaagagtgaggtgactgaagagggttttggagtttgaggaggcaggaacaaaaggataggaatagggcggggggagttccaagagaggacaatgagaggcgaggcatttttccaccacggagtgtgtttcagctttctgcaataccccagcggttctcaactgggttgatttttttcctcccaaggggacattcaatagtatctggagtcatgtttgtttgtaacaactggtagggaatgagtgggtgggttctgtcatctactgagtagaaaccaaggacactgctaaacatcctaccacacacaggatgcagcccccaccacccatgaaggcccaagacatcaacagcagtgagttgagaaattgcaatacatcccttccttgccccaagttccctctgtagcaggagagcaagtcagaataacagaactcaaagcctcttaaaaccccccttctcggccacacatggtggctcacgcctgtaatccccagaggcccaggtgggaggatcgcttgagcccaggagttggggaccagactgggtgacatagcatgctagatctcatctctactaaaaattttaaaaattagccaggtgtggtgatgcgtgcttgtagtcccagctacttgggaagctgaggcaggagaatcccttaagcccaggagatcgaggctgcaatgagctatgatcacaccactaaactccagtctgggtgacagagtgagaccctgtgtcaaaacaaactaactaactgcccttcccataaatcccagtttccccaatcaggtggtcccattaggcccatcttttttttctttttttttcttttttttgagtcaaagtttcactcttgttgcccaggctggagtgcaatggtacaatctcagctcactgcaacctccacctcccgggttcaagtgattctcctgcctcagcctcctgagtagctgggattataggcaagcaccaccacgcctggctaattttttttgtatttttagtagagacagggttttgccatgttggtcaggctgtctcaaactcctgacctcaggtgatccacccacctcggcctcccaaagtgctgggattacaggcatgagccaccacgcccagcctcattaggcccctcttaaccaagttctagggtgagggataagttgcttacagggttggcgtggatacagcactacaccctccccttaaaagtagggagtagacgccaagggaaactagagctatataatcccatcatcaagccttcagccctcttccaggacctgccccaaccggcctatccaggactgaaacaacagcatgggccccacctccaccccaccatatgcctgggacctagggtgtcaaattccccaggacctccaaacacttcctcctctgcccctctgagaacagcaatcctggtgcacacccacgaacctgtgggggtacccacacctccacctggcctcccagacccttgaccgcaggggctctccacccagcctagcccctggcaccagagccctggcccagctccaggttttgcattctgcccttgtgacctggccaggaggtgggtaactagggccagtttcttcttcttttttttttttttttttttttgagaccgagtctcaccctgttgcccaggctggagtgcagtggcatgttcttagctcactgcaacctccacctcccgggttcaagcgattctcctgccccagcctcccaagtagctcagactacaggcgtgagccaccatgcctggctaatttttgtattattagtagagacagggtttcaccatgttggccaggctggtcttgaactcctgacctcaggtgatccacccacctcggcctcccaaagtgctgggattacaggcgtgagccactgcgcctggcctactagggtgagtttctaaggcaggagctgagagtagacatggctagtagggtgctcaggagggcaggaggagggctgtttatgagccagtggtgggagagagtgtcattctagtctgagaggctttttccctgtggcttccagctctgcccttttcttaaacactccttcagcctcagcttggcttcagtcccaccaagtgcagtctgactcgtggagacatgagagatagagagagtgagagaccagagagatcaggagacagtgactgagagggacttacagggagatcagggagagaagcagagagaaggagaaagcccagagagcataagaaatgaagacccagagacaccaaaggagggagagacagagacacagagagacaaaaagattcagaggcagagactgtagaggcagaagcaaagcaagacacagagcatttcagagacccacggcaagagacagggaacagcatggagaactatgaaaaaataggcttccagagaaagagaaaactccagctctggagggaaagggacttagccagggccactcggcccatcagtggcagaaatggacttgaacccagagaaaaagaaacaagtgccccaaataccaaaggaacccagcccccatccctggcccatcattttgcgacagccccatgactaccccaaaaccaggcccaggctccaactggcaaagcaaaaaaaaaaaacaaagaaagaaagaaagctttgccccatcccaggagggcccccaggcgcagccccctcccacggcacctttccagctggctgtgagccctagggccgcaggaaaggtatggcaagatgatgggagggatttaaagttcacagcgagaacaagaaaagtggggttaaggaggagggtgtgggcagaaacaacttaagaacaacctctgccccaccaccccccaagcacacccagagctgcaggctctagcgcatcccagccagtgtctcctgcagctcagcaggtaaagggccccggtgagggaggcagagaaggagggggtgtctcccaagagagggtgggtcgccagctccaatctctgtctctgagactggctaggaatcttttttgctgtttcctctgagagctctcatgtccctgttctgagcactgggatttctttactggtgcttcaccaagtaggtggcttctctctctgcaatgcaaccccatggttggcaacacttgattttttcctgtcactgtttctgcctgtgcccttcctctctgtctccgtctctttctctctctctctctctctttttttttttttttttttttttgaggctggagtgcagtggttcaatctcagctcactgcaacctccacctcctgggttcaagcgattctcctgcctcagcctcctgagtagctgggattacaggtgcctaacaccacgcctgactaatttttgtgtttttagtagagacagggtttcaccatgttggccaggctggtctcaaactcctgacctcaagtgatccgcctgcctcggcctcccagagtgctgggattacaggcgtgagccaccgtgcccggcctcagtctctcttggtctgccctttgcagcctacccgtctctttgtgtggctctaatattccctgcctctcttattctctctctctctctctccatctctgtctatgtgactctgtctttgtgtatctgtttctgtctgtcattctcgtctccctcagtctctgtgtctagctctgtctctccctctctctgtccctcttaccctttttctctccatccttccatgtccctctctgtctctcagtcagtgtccatctcactgtctctccactcaatctcccttgtctttctctagctctgtgtctgtctagttctgtctctttctttctctagtctatgtcagcctctctctttctgtgatgtgctctctggctctccctatctctgtgtttgtctgtctctgtccctgtgtgtcttgatctctctttatcactgtctctgtatgacagtctcttgacagacaggtgatgatagatagataatagacagatgatacacagatgatagattatgaagatagtagatagatgatagatatagatagataatagatgatagataatagacagatcaatgatagatgatagaagaatagatagatgatggatagacagatgatagatgatagatagatagatagatgatagatagatgttgatagatgttagataatagatgagaaacaaagaaagaaagaaaaagaaaaaagaaagaaagaaaaagaaaggaaggaaggaaggaaagaaagagtgatagatgatagatggctgataggtagacagacatctgtagatatgtagatcgctcactgtttttctgtctctctcattatctttatgcatatctcttggcctctcttagtctctgttcctctatcacttgcctctctccatttatgtctctgtgtttctgtctccttatctgtctatatgttgactatctctgcctctttcctcctttctccctcccttccccatcccctggcctctccctgtctccttctctccatctgccttcatttccagggcctagggaaggtaagtcccaggggagatggaaaggagggatcagcgatgtcctctcccactttgccctccacacgccagcagctgccttcaccatggacagcataagcacagccatcttactcctgctcctggctctcgtctgtctgctcctgaccctaagctcaagagataagggaaagctgcctccgggacccagacccctctcaatcctgggaaacctgctgctgctttgctcccaagacatgctgacttctctcactaaggtgcaaggcccttagcttgggtgatggtggaaggataaggaggaggggtcccatggccacaggcccccctgtaacttctgtcttcctaccctcagctgagcaaggagtatggctccatgtacacagtgcacctgggacccaggcgggtggtggtcctcagcgggtaccaagctgtgaaggaggccctggtggaccagggagaggagtttagtggccgcggtgactaccctgcctttttcaactttaccaagggcaatggtaagcctcgtccttgtctcctccgctctcggccttttccatattgagggagggggtgagggtgagagactgttgtctcaatcttgttgacactcagggctgctgacatcactgatgacaccaaatgcaatgcagcgaggcagtgttggtctatggcaaattctctcccaccttcctcacctccagatcccaccactttcctgaattgtactcttgcaccactcctcatctccatccaaccccaaccccattgtcatcccaatccctagctctatcccaaccgcatcatcaactttccaactcagtcaagtggccccagttcccactgaccacctcaacccaatcccagtccccatcaacctttccccagtgttcaccacatcagccccaccttcatccctatccacaacactgacagcatctcaatccaaccttcattcccattatgaaccccatcccagtccccactttaaattctattatcaaccccatcctagtccctttagtcaaactgaattttttttttttatctgagatgagtcttgctctgtcacccaggccggagtgaagtggcacaatctcggcccactgcaacctctgcctcccaggctcatgcgattctcctgcctcagcctcctgagtagctgggactacaggtgcacactaccacacctggttaatgttttgtatttttagtagagatggggttttgccatgttggtcaggctggtctcaaactcctaacctcaggtgatccacctacctcggcatcccaacgtgctgggattacaggcaagagccactgctcctggcccaaactgaattctgctgctactttcccccaatcccagccccatctcctaacccaattacctattgaaatttccagttcccagttcttgctttcaatcttaaactcactaccatcaccaaaacaaccccatcacatatctacccaaccccaagttcaagctcagtcccaatctatcaatcctcctcatcctacccaactccatccacatcaccagcttcaaatacaatttatcatcaatcttataacccccttcattccccattgtcattcccaacctaacccaaactcaactccatcctcagccatccagcaattcatatcattcacttaaaacctcatctatgtcaatatcttgtccctctaaggcttggaatcaccctagtcctgtggtcttcaaactttatttatttatttatttatttatttatttatttttgagatggagtctcgttctgttgcccaggctggaaagcaatgacgcaatctcagctcactgcaatctccgcctcccaggttgatgccattctcctgcctcagcctcctgagtagctgggactacagacacctgccaccatgcccagctaatttttgtatttttagtagagactgggtttcaccatgttggccaggctggtcttgaatgcctgacctcatgatccagcagcctcagactcccaaagtgctgggattacaggtgtgagccactgcacccagccccaaactttatttcaaagacaaatctctgttcaaaggaagctatgtgacaagacccaataaatgatggaaggaaggagggaccaacagaaggaaggaggaagaaaggaaaaaggaaagaaggaaggaaaggaaggagggagggagggaaagaatgaaggaaggaaggaaggatggaaggaagccatcatgattggaaaggggatcctggagacctgcatcctggactattctctcctcacctccaaagaatgtctagggctctccctggctcctgcattagatgggtcccagctgccccaggatttgaaatcagagagctctggtacaatattacaatattacaatattgtgtattaggtacacgttccatccttcatgctcccttccctggcttgatctgatgaccttacctgtccaggtacaccagatgcaaagaggtggagacagggcacttgagaaagtcaccttgctacttttgcacagaaaacatctggatgggtacatcgtttgttaccaaaaatagccaccatctagttattcaatacacagcacagagggtaacagcagggttccaccactcactagctgtgtacccttgggccagaggcctcccttctcttcctcttagtttgctaccatgagaaaattataatagcattaactccatgttatgaggagtcaatgagacaatgcataaaaatgcaggcaatacactatagtcttttttctcttcttctttagtatctagttctctgctaggtccagaggaaccagagataaacacatctgagactttatcctatagtaggtcccagtccagtggaagacacaggcatcaccaaccagattgtgccatcccagagtggtccaggctgggatgggggaagcctggggagctatggaaaccctagagaaacacttggcccagcctagaagggaggaggagccagagaaggcttcctggaagaggggacctctaagctgaaacctaaagaatgaagatgagtattcaggagaaggcagggggtgaaagtgctctgggaaagaccagcctgtgcaaagattctgggtccaggaagagaagagacggggtctgttttgttcctggatgaattcccagtgtcctggtgcttatttttcttgcctatctctcttattcatgcatttaataatcaataagcaggccaggcacgatggctcacacctgtaatcccagcactttgggaggccgaggtgagtggatctcctgaggtcaggagtttggtaccagcctggccaacatggtgaaacctcatctctattaaaaatacaaaaattaggccaggcgcagtggctcatgcctgtaatcccagcactgtgggaggccaagacgggtggatcacgaggtcaggagatcgagaccatccttgccatgcctgtaatcccagctactggggaggctgaggcagaagaattgcttgaacccgggaggcggaggttgcagtaagctgagattgtgccactgcactccagcctggcaacagagcaagactccgtctctctctctctctctctctctctctctctctctctctctatatatatatatatatatatatatacacacacacacacacacacacacacacacacacacatatatattaggtgggcgtggtggtgcacacctgtaatcccagctagtcaggaggctgaggcaggagaatcacctgaacccgggaggcggagggtgcagcaagctgagatggtgtcactgcactccagcctgggtaacagagcgagactgtgtcgcaaaaaataataatcatcatcaataagtaatcaccagcacctcctgtgtgacaccctctgcactggacaatgctaaggacccagtggtgaccaagacaggcacccactctgccttcacagttctgtgaaggagacagccccatcaccagacagtaacagcccagagtgatcaggttcttaatggggaaacagaggcagagtgataggatggtcgtgagggaagcccatggtcctatggaagcttgaaggagacccctaagctggagggtccagaagggcttactggaaggagccagggagattccaaactctgtctctctcccagcaaataccatgaaaggggacctgggtggcagtggcctcaggatgagttcccggttaagctggtcccctcctcttctccccaggcatcgccttctccagtggggatcgatggaaggtcctgagacagttctctatccagattctacggaatttcgggatggggaagagaagcattgaggagcgaatcctagaggagggcagcttcctgctggcggagctgcggaaaactgaaggtcaggaattttttttaacaggctggatggcacgatcttttttttttttaacaggctggatggcagccttgacctcctgggcccaaaccatcctcccacctcaacctcccgaatagctggtacttcaggtgtgctccaccacacccagcttatttttaaattttttgtagagacagggtctcactatgttgcccaggccagtctcaaactcctgtgtgcaaatgatcctcttgcctctgcctcccagagtgctggaactataggcatacaccaccatgtctggccaggtctttgaatccagttcatccttataattcacatccattctacttttttttttttgagacagagtctcgctctgtcccccaggctggagtgcaatggtgtgatctcagctcattgcaacctccgcctcctgagttcaagcgattctgcttgctgactgctctgtcgcccaggctgggttgctgtgtactagcgtgtgttgtgtggcaggattatgtagctgtatgctggctttatgtgttggtgtgtggttaccgtgtcttgggatgtttccgggctggctgttaggtcactgcgtgtcgtgtgttggcatgtactgtgatcgtatttgctgggtgttctgttgccctgtgttgttgtgttccgtgatgcctgatgattgccttgtgctatgtcgcgtgctgtgtgttgtgttgccaagaatagcccgttctgtggttgggcgttgttgctgtcgatgtgctgcaggaagttgtgggttcggtgccgtctgtggcattgacagatgcttttggggtgtcgttaagcagcatgttgtgaccatgtccccgtgtttgcaccgtaagacacgttgccatggttgagtcggatgttgtacaaattaatggtgttgctgcatgaggtctggtgtgctgcacatcgcgtcttcctgatccattgcactccttaccctcaggcgagccctttgaccccacgtttgtgctgagtcgctcagtgtccaacattatctgttccgtgctcttcggcagccgcttcgactatgatgatgagcgtctgctcaccattatccgccttatcaatgacaacttccaaatcatgagcagcccctggggcgaggtcagccaactgagtccagcaggggcagggtgtggggtccgcaggatctaggaatggagaggaaacagtgggcggggaaagggctgtgaatggcccgcccagggcccgccccctcccatctgaccccacccagagttacacggccacgcccactcccctccactgagcatttatggccgccattgcctccttcccactccccctcagccccaacccccaccccggacctggctgccctttgagaccctgtccctgcctacctaatccacactgaccccattcgcccctgaacaccctttgtcctcctccaaaaccctcctactctgtctggtccccagttgtacgacatcttcccgagcctcctggactgggtgcctgggccgcaccaacgcatcttccagaacttcaagtgcctgagagacctcatcgcccacagcgtccacgaccaccaggcctcgctagaccccagatctccccgggacttcatccagtgcttcctcaccaagatggcagaggtaatccctacctggaaatcccacctctagtctgacctgaaattctcctgctgcccctgcctcaaacccacagggaccccagatggggcagggttgggggaccttctccctggagaagctgaagcatctggcccagctgggctggagccaggagccactcgcagccaccgccaacttacagctcattaagaagtcatcaaaggaggtggggcagggtggagggggcagttgctcaggcttgttatcccagcactttggaaggccgaggcaggaggatcgcttgagtccaggagttcgagaccagcctggacaatatagtaagacccagtctctacaacacatacgtacacacatacatacacacacacatacatacatacatacacacacacatacacacatacatacatacatcatacatacatacacacatacatacatacacacatacatacataaaacgtattttttaaaaaaacaagaagtcattcaagctctatccaagaagttaattgtaggccctgcagctgagattttccctgccctgcccttctccgttccccagctctcccagggaaagaaagttaaacccagctgggaccgaatgggcccccagcagcagttgtactggtctagagtgaaggggcctccattcctggctcacatccccacccctctaccaatgcaggagaaggaggacccactgagccacttccacatggataccctgctgatgaccacacataacctgctctttggcggcaccaagacggtgagcaccacgctgcaccacgccttcctggcactcatgaagtacccaaaagttcaaggtgaggcccacccacacagcagcgtggaggtgcccatgtgttccagcctcaccccagagcagggagccacggccccgcctcccaggtctgatatagcctcctgctggcaccaggattccacagccaaacccacaaacccacacggaggccgatcccaccacatggcccatgaggtccatgcagcctgcccgaatcccgacccagatcccacccgcttaattgttggtttttttgtctttgttttgttttttggagacggagtctggctctgtcacccaggctggagtgcagtggcgtgatctcgatccgctcactgcaacctccccctcccgagttcaagggattctcctgcctcagcctcccaagtagctgggattacagcctcccaagtagctgggattacaccaccacatccagctaatttttctatttttagtagagacagggtttcaccaagttggccaggctggtctcaaactcctggcctcaagtgatccacctgcctcagcctcccaaagtgctgggattacaggcgtgagccactacacccagctctgcttagttttttgtttgtttttgagacagactcactctgtcgcccaggctggagtacagtgccgtaattacagctcactgcagccccttgggctcaagcaatctccccacctccgccttatcaatagctgggagtacaggcgtgcaccaccacactcaatacactcagctaattttttattttttgtagagacagggtctcgctgtgttgccctggctggtccccaactcctgggctcaagcaatcctctcaccttggcctcccaaagtgctggggttacaggtgtgagccaccgctcctgcctccacccgcttagtcttgctttgtgccgagtgcgtcaaccaccacatgcgtccacctccggcttcagagccctgccctggagccccagccatgtgcctgccagggaaccctacctctcccatgcagcctggcccacacacacagctctgtctgctgctccacctccccaagctccatctctgggtgtatcccctgctctgcccctgatctccagccctcccacacagtccacccactcgacctaccgtccagccagtagagccccaaaactgctcctgaaatcccatcaggtcctggattccaggcctccctgaagccctgcccacacaacccaacactcaggcccttgcacaagccaagctttcgccctcactgacccacttcctcccagaccctggctaattcttttttttttttcctcttccccccccccttttttttttttttttttttttttttgagacggaatcttgctctgtcacccaggctgaagtgcagtggcctgatcccagctcactgcaacctcctcctcctgggttcaagtgattctcctgcctcagcctcccaagcagctgggaccacaggtgtgcgccaccaagcccagctaatttttctattttgttgtggagattgggtttcaccatgttgcccagatggtctcaaactcctgggctcaagcgatccgtccgcctgggcctcccaagtgctgggattacaggcgtgagccaccgcgcccggccagctctagctaattctcacgtgcgccccagcagtggcgccccgcgctgggagactttgactagacgcctccccacacacgcacacacctcttatcagcctggttgccctgtcgcgcccgctgataccctcgaccccgcttcccgcttcctctccagcccgcgtgcaggaggagatcgacctcgtggtgggacgcgcgcggctgccggcgctgaaggaccgcgcggccatgccttacacagacgcggtgatccacgaggtgcagcgctttgcagacatcatccccatgaacttgccgcaccgcgtcactagggacacggcctttcgcggcttcctgatacccaaggtgcgctaggcctggcaaacgacatcaggcaacctaagaggaggcatcgcaggctcttgcactggcaaggagtatcccaggcactagccatgaacaccccaggccttagcaactggcatcccaagccctagctacagacatctcagacccttaaatccagaagctcaggcctttgccaggaccccatctcatatcatagtggactagaccccttcaccatgacaaatccccttcctagaacccctccctggaagccctggggtctggaacttcatctggaggatcccctgggcctaaacgctattctcagggacccctccttttccccagaaaccccacatctgttcccacaaaggttgggggtttcccacatccctgccaaagtccccaataatacagcatatagcacccatcacttggaaccctagacacccacacatatttccttggcccccgattgagtcctatacccacctatacccaccccttatcaagtccccaggacacccagcccaatacaatggaaaggagtttgggagcctcccagccctcctacactgctaagtccacctcctcacccacacagggcaccgatgtcatcaccctccttaacaccgtccactacgaccccagccagttcctgacgccccaggagttcaaccccgagcattttttggatgccaatcagtccttcaagaagagtccagccttcatgcccttctcagctggtgagggcaggaatcagagtctttctggcccaatttctacctacattcctcaccctaattccacttgccaaatcctctcactccttccttccacccattctcagctttggatgcacagagacattcattcctcctctcaactctgctcctataggcaagtagtgactaaaatcctcgtgaagcaaggtggggaggttgattaataatttaacttgggactgggcatggtgactcacacctgtaatcccagcactttgggaggctgaggtgggtggatcgcctgaggtcaggagttcgagaccagcctgaccaatatggtgaaaccctgtctctacttaaaatacaaaaattagctgggtgtggtggtgggcgcatgtagtccccgctactctggaggctgagacaggaaaatcacttgaacccaggaggcggaggttgcagtgagccgagattgcaccattgtacagagagagactctgtctcaaaaaaaataatgataataatttaacagccaggggcagttgctcacacctgtaatcccagcactttgggagatctaggcgggcagattacctgaagtcaggagttcaagattagcctgaccaacatggtgaaaccctgtctctactaaaaatacaaaattagccaggaatggtggcacatgtttgtaatcccagctactctggaggctgaggcaggagaatcacttgaacccgggaggcggaggttgcagtgagccaagatcatgtcattgcactccagcctgggcaacaagaacaaaactccatctcaaaaaatgaataaataataattataataattattatttaacttgggccaggcacattggctcacacctgtaatcccatcactttgggaggctgaggcgggaggatcgcttgaggccaggagttcaagaccagcctggacaacatggcaagaccctttctctactgaaaatgttaaaattacctagatgtggtgtggtgtgcatctgtggtcccagctacttgggaggctgaggtgggatgatcacttgagctcaggagtttgaggttacagtgagtatgatcatgccactgcactccagtctgggcaacagagcgagatcctttctctaaaataaaaaatactgactagccaaaaataaaaaatatataaaaattttaaaagaaaaaaaaattgaacttgggagtggtcattgtttacctctccactgggtggcgcagttgaggtggttctaggggtttttgttttgtttgtttgttttttggctttcctctttaccctgctgaaaaactccctctttactcagtggcaggaaaagaaaaaacaaaaaactggcataataataggtaacttaccatattgcctactgtgcgtcaagtgctgcctctacaagagcccagctaagagcttatgttttcctctgggaatgtgtggcccagattccagcagggtttgcatcccatctgtcaccccctagctgtgttgccttgggtatgttactccacttctctgtgcctcaatgtccacatctataaaatggagataatactaaggcctgcctcttggagttgttagaattaattgcgatgtaatgctcagagtaatgcatggcccatggtaagctacttacagcctcactgctttccctgtgtttaccattcacagcagcctcatgaggcactattactatccctccttttatttttctttctgagacagggtcttgctgtcacccaggctagagggcagtggcacgatcatggctcactgcagccttgatctcctgggctcaagtgatcccctcgcctcagcctcccaagcagctgggactgcaggcatgtgccaccttgcacatttttaaaattttttttgtagagatgggatcttgctgtgttgcccaggctgctctcaaactcctgggctcaagggatcctcttccctcggcctccgaaaatgctgggattacaggcctaagccagcacgcccagccttcatatccccattttaaatatccagaacgtgtggtttgtccaggatcacaaaactagtagtgacagggccaggattcgaacccaagcagcccaggtcattccactccacagtttaaagcatctttcccagttctttacatgggtgaatctgtgacgtccccagctgctgtcttcctttcctcttatgttttcctctgggaatgtggggttgcagcctctaacctcatcttatctcaccgccgctccccatcctgccacccctgcagggcgccgtctgtgcctgggagagtcgctggcgcgcatggagctctttctgtacctcaccgccatcctgcagagcttttcgctgcagccgctgggtgcgcccgaggacatcgacctgaccccactcagctcaggtcttggcaatttgccgcggcctttccagctgtgcctgcgcccgcgctaacgccccggcccttccagattcgcctgtgagcgatgaggcccgcccatgcgggttgctacgtccccttcttggtccacagtctgccctcatccctctggcagtcacgctgtcttccctgcatgctgtgcctgccgcgtgcccttcccccatccctccaatctgtgccccgtctgcagggcagaggcagatgtggcatgtctttttgtacccacagagcttgttctatggcacgcccttttctaggctttttgtatcatttcttagtacattgtaatagattcaaaccagtcttggctgaattaaagtgagaatgagagtcatttaggatggggagaagggagctggctgcagagatggagacactggctagttttgccctcacctttagggtggctagggtgggacaaattgtatcctggagacaggcttgaaggtaaaggctgcgaggacctgaagccagagaggcagagaaaccaagacagagaaaaaggcagcaggaccaggtgaggtggctcacacctgtaatcccagcactttgggaggctgaggcgggaggatcgcttgaacccaggagtttgagaccggcctggcaacagagtgaggcctgactctacaaaaagtcaaaaagtggggcaggaggattgcttgatcctgggaggtcgaggctgcaatggggtatcattgcgccactgcattcccgcctgggagacgggagtgagaccctgtcagaagaagaaagaaaaaagaagaaggagagggagagggagagggaggagggggaggagggagaggagaggaagaagaagaagaagaggaggagaaggaagaaggagacagcagcgagatatcagagagaatatgcaagagatgaagggcactgcagagagatggaagcagggcaaagtgaggctaaggaacaagcactgacactaaatgacactccctatttgcacgctgttctgaatgcctcattaagtctccctatgaggcaaagccatgttttttgctttggtttgatttgggaggttttttttctttctttctttctttcttttttcgagacagagactcgctctgttgcccaggctggagtgcggtggcgcgatcttggctcactgaaacctctgcctccctggttcaagtgattctcctgcctcagcctcctgagtagctggaactacgggcatgtgccaccactcccgattaattttttgtatttttagtagagacagggttttactgtgttagataggatggtctcaatctcctgacctcgtgatccgcccacctcggcatcccaaagtgctgggattacaggtgtgagccactgtgcctggcctgtttgtttcttttataggcagggtctccctctgttgcctaggctggagtgcaatggcacaattcaaggctcactgcaaccttgaacttctgggttcagctgatcctcctgcttctgtttcagaccaccaaatagctgggactacaatcaccgtgcctggctaattttttttttttttttaatctttagtagagacagagtcttgcagtgttgcctaggctggtcttgaactcccgaactaaggcgatcctcccacccaaaaagcactgggattacaggcatgagccaccacacctggccacaaagcagtattattatcatgtttttacagatgagcaaactgaggctcagagaggtgaagtgagttgcccaaggtcacacagaaacaggcagagctgggatctaaattcagactctgaggctacagacactgcacttcttttcttttttcttcttctttcttttttttttttttttttcttccaagagaagctgtcactctgtctctcaggctgggatgcaatggcataatcacagctcactgcaatttcaacctcccaggctgaagagatccttccactttagctttctgagtagttgggactacaggctgcaccacaaccacacctggttaatttgtttttatttttattttttgagttattttttgagacagagtcttgctctgtcacccaggctggagtgcagtggctcaatctcagctcactgcaacctccacctcctaggttcaggcaatttttgtgcctcagcctcctgagcagctgggattacaggtgcccgccaccacacccagctaccttttttttttttttttttttttgtatttttagtagagacagggtttcaccatgttggccaggctggtctcgaactcttgggctcaggagatccacccgcctcagcttcccaaagtgctgggattatgggcgtaagccactgcacccagctgctaatttttttatttttaatttttgtagaggcagtctcactatgttgcccaggctcgtctcgaactcctggcctcaagtgatcctctagcctcagcctcccaaagttctggacaacccgtgcacaccaccatgccctactcagacactgcacttctaactactaccttttaattcacaagtcagagacccagaaagaaagaggcagacacccttaaatacagagaagagcagagaaacacagacactaagatatgggaggcagggggaatcgagagagagaatggaaagaaacagagaaatgaccagagaaagacagatgagcaatgacagtgggagttccgaggactgaggctccctccctcaatccccagcccctcttttcttttttttcttttttcttttcttttttttttttttggacagaatcttgctctgttgcccaggctggagtgcagtggcatgatctcagctcactgcaacctccacctccagggctcaagtgattctcatgcctcagcctctcgagtagctgggattacaggcacgtaccactatgcccagctaatttttgtatttttagtagagatggggtttcaccatgttggccaggctcgtctcgaactactggcctcaagtgatctgcccacctcagcctcccaaagtgctgggattacaggcatgaaccactgcactaggccctcccaccctctcactgaaattctctgaaattctcccgtttggagtgacgatagcaaccccaggcatgtaccctcccaacctgggacccgacctaataccctaacatcctgctgacagtggctgtttttgcggggcaggcgtcccaaagcacatcaagccagattcaagcagagtggaactggcccctcagccatcagtggaggtggcctgagaggctctaccctaaacggggtctccccaaggcgatgcagaaactgggacatgctctgctgagcatggggcttactggagtgaggcttataggcagtccccacatggggattaaggtgtcagctctttaatcccctcactgttcccatcacaggctgaccagagtcggccccagggcccagccagggacacagaggttgggggagagagggagacacagagagactcagaggtcctgagaaagacaggcagagagagatgatgcagaaaaacacctggagacactgaaaagagatggagaggaaaaggaagagacagataacgcagggatggcagagaaatcctggaaaacagagaccgggaggagaaagacagccactgagaaaagggaaagacagcgatgtccagagagaggaaagacaaagataaataaagagaacagaaatgaagagagatagagagacctgagagaaaaagaaaaagggaggaaaagaaagagagaaacagagaaatccagtctaattacaaagagatagaaacaccaaggcgggaggatcacttgagcccaggagtttgagaccagcctgggcaacataacgagacctggtctctataaatattttaaaaattagctaggcatggtggcacgcacctctagtcccagctacttgggaggctcaggtgggaggatcacttgagcccaggcagtcatggctgcagtgagctgtgatggtgccactgcactccagcctgggcaacagaacaagacagatggaagggaagggaagagaagagagaagaagaaagggaaaagaggggaggggagggaagaaagaggctgggcacggtggctcacgactgtgatcctagcactttaggaggctgaggcaggaggattgcttgagaccaagagttgaagaccaacctggccaacttaacaagaccccatctctataaaaaaacaaagagaggtagggaggaagaaaaattgggcattcattcaacaaacatttactaagtgcctactgctgtgctgagcgctattttaagtgctgggatacagaagcaaacaagacaaaatccttgctctggaagagctgacattccagaggacagcccacccgagcaaaatggaggaagagtcaggagctggggagaaaccagaggccataataaagaggatccattaaagcctgtcacagagggtggggtagggctgggggaggatgcagcttactgtgccccaccacactcccgctgtcagtggagtcagcagctctgagcaggggccctgccagacaacccatgtcagtcaccaggttccagaaaggctgacaggtaggaagacccaggacagggcaggacagaatatggaggtacaagggggtcaacatgcagaaaggcaccctgaagaaataaggagaggcacagaagtgccaggctgagacaaagggaagcacagactgggggagatacagggagaggaagacacagacatactgaaaagagagacagaaaacagacacaaacagaggcagagactgagagaaaggagagagagatgggaaaagatggaaagaggagagagagagagatgaacacagaaacatagagactgagcgtgagggaggctgggcacgctggttcatgcctatactcccagcactttgggagaccaaggcagaaagattgcttgagcccaggagttggagaccagcctgggaaacacagtgagaccctgtctcttcaaaaaatacaaaaattggcaggatgtggtggtgtgtacctgtggtcccagctactcgggaggctgaggtgggaggattgtttgatcccaggttgaggctgcagtgagccatgatcataccactgcactccagcctgggggacagaagccagactctgtctcaaaaaaagaaagaaaagaaaagaaggaaggaaaagaaagaaaagagagagagagcaagtgagactgagagatgaaacaaagagacacagagagaccctcccagagacaatgccagtcctaggctctgcacagtccccccccccccgcccactggctcgccaggtctgggccctgtgccaggcacttggaggaaggctggatttggccaagcaggggcaggcaggagggtggaccacattcctgaacagtctgttccaaatacagccccaacctcactcactgctgccaccaccgcaaccctggcccatccaggcctgagtctgccccctctagcccatgccctaggattgggggtagtgggggatagatgagagaataagggataagtttgtctgccatcatggcctggcctcagacaaggacttgggggactggataccagggggttcagcagcatgggcacagaacatttgggggcatctgggagccaatgccttgggaatagagatggtagattcagggcaggacataatatggaagtacaagggggtcaacatgcagaaagacaccctgaagaaatagaggcacagaagtgccaggctgatggacacccagaagccagggaaattgaaggcagatctggggaacaagcgtagcacacagggtcccaagagcaatggaagtgacaagggctcaggtgtgagctcctaggaatcacaggcacagagcacaggagtgccaggggtgtctttagaagtgtatttgagccaggagcagtggctcacacctgtaatcccagcactttgggaggccgaggcaggcggatcacctgaagtcatgagttcaaaatctgcctggccaacatggtgaaactccgtctctactaaaaatacaaaaattagcagggcctggtggtgcacgcctgtaatcgcagccacttgggaggctgaggcaggagaatcttgaacctggtaggcggaggttgcagtgagccgagatcgcaccactgcactccagcctgggcgacaagagcgaaactctgaaaaaaaaaagaaggagaagaaggagaagaagaaggaagaagaagaagaagaagtgtatttgagagtcggtgtgtatttaggaatcagaggtacagggtacagcgttcagggggcccagagatggcccggagattgaggaatacacacctacaggccaaataaattggactcaaaggtgctaggggctcaggagggtgcacctgttggccaggtgtgttgacatgaaaatgctggtgtacgaaagatgttaagtggggcaggctgaggcaggcacaaaaaaaaaagccaggaggagccagggcacagttccaccagggctgggggtgggctggagacgtcgggctggggaatccatggaatgagcagccctgagatgcccactcctcccacatcgggtctctgcccctgctccacccaagaccccttggaaatcaaatagaggtgcaggcgtggagaattgcaggcatgatgatcgcgggtatcgctgcgctgctgttgtggcttctggtgctggtgccggcgtggtgggggtagggtgggtgccgcgctcagatgcgggggtccctacctccccggcccaggctgctcccattgctggggaacttgcagctgcagtccggaggcctggaccgcgcgctccattcccgacaggaatgggggaacggaattctggattcgtggaggtggggctggggactagaactcctcctgaacgaagacagctgagggcttgtactctatgatcttgaggaaggacaggaaggatgagtgctccggactgctgagtactaggaaaggagaatagggagtggagagcctggggccgggacactgggtcgtaaggaaggagcccagagcaggaaatcaggttgtgggaagaggggagcagggggtctgttctcctggttcagggtggggaggtactgagggcccaggagacactctgagggtacaggaggttgggaatctggacttctaggtcccaagggaagaaggaagtgggggcctggactcccgcatctcagggaggaaggagctggggatctgaattcctggacctgaggaatgagggtctgagacgaggactcctgggtctgaaggaagagggagctgggggcaatggctccgatgaggaaccctatgggcacccgctgagcaccggctacccgtagctctccggccgctggggccgggtgttcacagtgcggctgggcccgcgccctgcggtggtgctgtgcggctacgcagcgctgcgggacgcgttagtgctacaggcggatgcggtctccggccgcgggtccatggcagtcttcgaacgcttcacacgcggaaacagtgaggccccggcgctggacttgccggtccggacgctccaggctgggcgggtaaatggtagaggcgggcaaatgggggcggggcctaatagagactccagctaatgaggtgcaaacggccgagagagggcggggcggcgctaaagcgtaaggttagaatggaggttcatcctgcagccaacaggagaaaagagcctaagattcaaagtcccagagccagcctaggtcagggatggagcccagcaaaggcggggccaatgtgtggatagggcacttggaggtctggtaaggcagcaaaacgaacgaagccggccgcaggagtcggaggccccgaaagggatgtagccagtgacccggcgcttcctggatggggcgtggccggttcccgggcccgcctcctttcccgtccccaccacaggaatcttgttttctaaccggccgtgctggtggacactgcgcaattttgcacttggagcgccgaagaagttcgggttggatacgcggaccatcgaggcgcgtgtcctggatgaggcggcttgtctgctagacgaatttcaagccaccattgcttcggcctggccgggagagcggaagggcctggtgtgggagagtcccttgcactgccaagacggggccactggaaggtatttgggtggaagaaagccagtaagcccatggggctggctgggggcaggaccacgcgttatgaccaccgtcctgttcctacccccaggagccccgtttgaccccgtgcggctactgggtaatgctgtatccagtgttacctgttcttgtcttcgggaaccgctatggctacggggacccggagttcctgaggtcctgaacctcctaagtgacaacttccgcatcatgagttccaaatggggcgaggtgagagggccggccacaatctctcccttgtgcgtccagccttatgccaaatcccgagtacacagacgtacctacaatgggacagttagattcttggaagagttctagaacctccaatatcaaagtccctgtagggaaactaaggcctagtgggcatgtccagggcccttgttgagaccctgtctctccagatgtacatttgcctgtctctcatggactggctcccgggcccgcaccaccaaatcttccaaaacttttcagagctgcaggtcttcatctctgagcaaatccaacaacactggcacatgaggcagccggcggagccccgcgatttcatcgattgcttggccagatgggtaaggcatgggtcccagctccctaaactctatccatgccgcccaccaacaggtgcctggcgcgcggcagcccatcttctctgcccacagaaacagcaagacccagagagccatttccaggaggagacgttggtaatgacgatgcaacttttttttttttttttttttggtggcacagaaaccacgagcaccaccctgtgctccatatgggctcctcattctgcttaagtacccagaggtggcaggtctgcgagccagagagacccagaatgggaggctgcggtttggagatggctggagggtcccggaagtgcacagcctccctctgccccagccaaggggcaggagctggaccctgtggtagggcagaggcctgtcccaagcccggacgaccacgtgcaatggccctacaccaacgcagtgctgctggagatccagcgcttcatcagcgtggtgccgcgcaccctcaccctcgacacccacctgcacagccactgtctggccaaaggtgcccactgagtctggagatcctgtgtggggccccgatgcatgagcgtattccgagatcagccagaatcggcaggtgtgcgctgtgcagacccaaacacaatcagttacccctggagcaggaaagtagacctgccttcccttcagcatttttttttttttttgagatggcatgatctcggctcactgcaacctccacctccccaatacaagtaattctcctgcctcagcctccctagtagctgggataacaggcacccaccaccacgcctgtctaatttttgtatttttagtagagacggggtttcaccatgttggccaggctggtctcaaactcctgacctcaagtgatccatccttctcggcctcccagagtgctgggattacaggcgtgagctacccacccagcctattcccttgggcttttaaaaagccatttcggccaggctggtcctgaactcctgccctcatgtcggccaggctggtcctgatcttcccacctcggtctcccaaagtgctgggattacaggtgtgagccaccgtccatggcccatgatgttgttttgaagactcagtgaggacatgtgtgtactagacttggcacacaagagttggtcaaatacatttactgctccccacccttctaataaaccaaatgcagctgtgggatagtagggggaggcactgggatagctaagcagggaggggatcctggggctccagggatgggcagagactcagatgctcagatctggtatggagccccatgactgaaccccactgagattttgggttctttaatacaacagtgaacctttcaatgaccatgaaggtgtctcagcctcctgagtagctgggattacaggcgcatgccaccatgcctagctaatttttgtatttttagtagagacggggtttcaccatgttggccaggctggtctcgaactcctgacctcaagcaatccacccgcctcggcctcccaaagtgctgggattacaggcatgaaccaccacacctggccaagactccaactcttaaacaaacaaaaagacactcatattggattcaagcccagctaatgacctcatcttagcttgatcatctgcaaagaccctttccccaaataatatcacattcacaggtcctggggttgaagatttcaatatcttttgggagcacaaaattcaaagtataacaatgatggagatgtagagaaatggacatgttccaaagacatttaggaggcaaaatcaatgactcagggatgggttgcttatggccagttggggaaagaaatgtgttgagcatgaacctggaacaatggaacagatggaaattttcttagtagagatggggtttcaccatcttggctaggctggtctcaaactcctgacctcaagtgatcagcctgcctcagcctcccaaagtgctgggattacaggcatgagccaaacactcctggcctcagatggaaaatttccaaacacacacagggctgggggctgctgtggtcttgccaactgctccaggcatgcatgttgggggccacagcatccctgtccgtggggatgtcatccagaacagtccctgcccctggaaaggtggaaactgcaagaggcacccccattacagactgaatccaggaaccttacaacgaatatttgaaacttaaaaatagagactcttagcgctgtgggatcataaacttatagaataataatggttaacatttacagagcccatctagatctgagcattgcactgtgcaatttacatttatgaccttatttaaccctcccattgccttccaagtcagagatccccattctctaaataaggaatagctcagagggagaatggtctctgggatctccagggttagaaagtgacagatttgggccaagcacagtgctcatgcctgtaatcccagcactttgggaagccgaggcgggcagatcacttgaggccaggagttcaagaccagcctggccaacatggtgaaaccccgtctctactaaaaatacaaaaattagccaggcatggtggcgcacgcctgtagtctcagctactcaggaggctgaggtgggagaatcgctgaaacctgggagacagaggtggcagtgagccgagatcatgccactgtactccagcctgggtgacagagcaagactctgtctcaaaaaaaaaaaaaaagtgacagatttggattcaaccctaggtctgcccatctccaaaacccttaagcaatagctttccttgcactttcaacaacagtcacagcaagaatgctctcattacaggccaggcatggtggctcacacctgtaatcccagcactttgggaggctgaggcaggcagatcacttgaggtcaggagttcgagatcagcctggccaacatggtaagaacggtctttactaaaaatgcaaaaattagccaggtgtggtggcgtgtgcctataatcccagctactcgagaagctaagggacgagaatcacttgaacccaggaggtgggggttgcagtgagccgagattgtgccactgcactccagcctgggcaacagagtgagactccatctcaaacaaaaaaaaaagctctcattacagagcctgctgtgagccggaactacctaaatatttgacaggcattgtacagcttggcccccatttcgcagatgaagaaaccgaggctcagagatgctaagccattttcccaaagtcaccagcaagtagaatgcccaaggtgtggcttgaatccaagactgttgtctctctccaaagtccacctcagagcagtggaagggaccacctcacctaccctgacacttgaagatgaaagaagtgtggaccacagaaggaaagacctcatgcaagatccacagcaaaccatggccaagggaactgggatggcaatggggaagaagtagagctcttgcatcagagccctgtatctgagccaagggtggtggctcatgcctgtaatcccagcactttggaaggctgaggcgggcggatcacgaggtcaggtatttgagaccagcctggccaacatggtgaaaccctgtctctactaaaaatacaaaaattagctgggcatgatggtgtgtgcctgtaatcccagctactcaggaggctgaggcaggagaatcgcttgagtttgggaggtggaggttgcagtgagccaagatcaggccatcgcactccagcctgggcaacagagcaagaaaaaaaacagccctgtatctgtagacatttctctgtgtatctctctcacacccttcttgagaaggacataaaatctgtggacaaagcaggtgtgggcccttaatctcccaaggaattcttctgaactttctttgagacagaatctcactctatcacccaggctggagtgcaatggagccatctcggctcactgcaacctccaccttctgggttccagtggttctcctgcctcagcctcctgagtagctaggattacaggcatgcgcgacacctggctaatttttgtatttttagtagagatggggtttcgccatgttggccaggctggtctggaactcctgacctcacgtgatctgcctgcctcggcctcccaaagtgctgggattacaagtgtgagccaccgtgccccacccacagggttgttttgaagacttagtgaggacatgtgtgtcctagacctggtacacaagagttggtcaaatacatttactgctccccacccttctaataaaccaaatgcagcactgggatgtcggggggaggcacagggatagctgagcaaggaggggatcctggggctccagaggcaggcgggggactcagatgctcagatctgatatggagccccatgactgtgaaccccactgaggttttgggttctttaatacaatagttaacccttccttgactatgacacccaggagccatcctagcctagcccttggactccatctggtgccagaatggcccagggcttggatatctcaaaatatcagctgacaacaggtcagtaaatattctgagaaaatgaaaaatggacaacctgaaccccaagccttgcttccgcctgaacgctgacccagacttcggtcacattctgagaccagattcctggtcactcagtgagcactggacctggaccacccatccaagctactgactccacgctgatcctggccacagcgtgagccatgaaaggcacctcagggagaaggaacagcaagaggaaagggcaggaggcttggaactgtgttgtgtttggctagaggtaacaagagaaaaagtttagcccagagggtccatcggggaaaattttgggacatggaccatgagaggtcctttggattcttagaaatatctctgaatgtcccaccaaggagttttgactttttcctagggcctttggaaccacaggagatttaaagtaggggaagtcacaatcaaatctgtgctgtagaaaaatcactctgaaaccagacacggtggctaatgcctgtaatcccagcctgggtgacatagcgagaccacgtctctacaaaaaataagaaaattagctaggggtggtagcatgagcctgtagccccggctactcaggagactaaggcaggaggatcgcttgagcccaggagttcgaagctgtagtgagctgtgattgcaccactgcactccagcctgattgacagagcgagaccctgtcaaagaaaaaagaaagaaaggaaaaggaaggaaagaaggaaggaaggaagggagggagggagggagggagggacagagggaatctctggaccttgaggggaatccacagaactggatctgctgacagatgttggctaagttaccaatggctcatgggaacaaggatatctatcaggacatctacaggaaaacagcctgaaaaatgtccatattaattaaggtaaagaccaggttgttgtaaccaacagatcccaaaatgcaatcattcaaataaaatacaagtttctttctttcttttgtgtccctcttgaagtagacagttagtccagcactgcaaggtggttcccctccttgtggtcaatcatggacccagattccttcaaactcgttgctctgctatagttcagtggttctcaaagtgcagcctccagacctgcagcatcagcatcaccttggaactttttttttttttttttttagacagacagggtcttgctctgtcacccaggctggaatgcagttatgcgatatcagctcactccagcctcaacctcctgcacccaagcaatcctactgccttagcctcccaagtagccaggactataggcatgcaccacacacccagctatctgaaacttgctaaaaactcaaattcttaaaccccaccccagacctactgaatcagaaacccaaaacctgtgttttaacaaggcctgcaggcaattctgaggcatgttctcagcagagcatcactaccctacagtattatcatgatcttcatggtcaaagagcagaaggttttgtacagcttttccccccttttttcttttctttttttttttttttttttttttttttgagatgcaatttcactcttgttgcccaggctggagtgcaatggcacaatctcagctcactgcaacctccacctcccaggttcaagcaattctcgtctcagcctccggagtagctgggattacaggcatgcaccaccacacccggctaggttgtatttttagtagagatggggtttctccatgttggtcaggctggtctcaaactcctgacctcaggtgatcctcctgcctcggcctcccaaattgctgggattacaggcatgagccaccaagtctggcccccttttttcttttctttccttttctttctttttctttcttttttttttttttttgagatggaatctcactctgtcacccaggctggagtgcagtggcatgatctcagctcactgcaatgtccacctccccaatacaagtaattctcctgcctcagcctcccgagtagctgggattacaggtgcacaccaccacgcccagctaatttttgcatttttcatagaaatggggtttcgccatgttggccaggctggtcttgaactcctgacctcagatgatccacacacctcggcctcccaaagtgctgggattacaggcgtgagccactgcacctggctggttttctacttcttgagtcatccactccagtacagaagatggaagggatggaagacctctggctgttcaaagacctcggacccagaagaaacttgaattttgggcacacaacatgggttacgagggtgagggagtccagtctagcataatggtgagtaagatgggtcctggagacaggctaccttattttaaatcccaaatgtgtgactttccacaagtaacatctccttgagcctcagttccctcttccataacaggggaatcatgacagtattatctgtctcatggtgttgctatgagaattcatggtgttatgtccctgacacgtaacaagccctcaagtgttagtttaatattagtcttaacattttaaggttgataggagtgtctttttgtgccaagccttgcgttaaaggattttctacagtatcacattgaatcctcatggtgtatccatcatgattgctgtatgttatacagagataggttttgttaaaatactcattttataaaggaggaaactgaagggcagactggtgaagtcatttatatatatcaaaggaaatatagattgtaggtgctggaactggaattctaactcaggtatgattgacgtagcctcaagtcttcatcacctctcaagaaaaccagctttctccccggcatggtggttcacgcttgtaatcccagcactttgggaggccaaggtaggtggatcacaggtcaggagctcaagaccagcctggccgacatggtgaaaccccatctctactaaaaatacgggcgtggtggcaggcgcctgtaatcccagttacctgggaggctgaggcaggagaactgcttggaccctggaggcagaggttgaggtgactcgagattgtgccactgcactccagcctgggcaacagagcgagattccgtctcaaagaaaaaaaaagtaatgaaatgaataaaatgagtcctagagccagtaaatgtcgtaaatgtctcagctagtcaggtagtaaaaggtctcaactaggcagtggcagagcaggattcaaattcagggctgttgtgatgcctccgcagactctgagcgccacctggtggtaatttgtctgtgcctcttctgacgtggaagaacagcaactaacacactaacacggcatttactatgggccagccattgttctaagtgctttacttagatttagctttttttttttttttttcttttttgagatggagtcccactctgtcttccaggctggagtgcagtggcacaatcttggctcactgcaacctctgcctcccgggttcaagcgattctcctgcctcagcctcccgagtagctgggattacaggcgcctgccaccacgccaggctaattttttgtatttttacaaaatacaaattactaattttttgcattttcaccatgttggccaggctggtcttgaactcctgaccccgtgatctacctgccttggcctcccaaagtgctgggattacaggtatgagccaccacgcccggcccatttaatttaaattaatttatttaatccctccccttaacaacccgctaaagcaggtaagttataatcggcaccccttccacttttcaccctttttttctttttcatttcaatattttttggggaaacacttggtttttggttacatggataatttctttagtggcgatttctgagattttggtgcacccgtcacccgagcagtttacactatacccaatgtgtagtcttttatccctcacccccctcccacccttcccctctgagtccccgaagtcctctatatcattcttatgcctttacatcctcatagcttagctcccacttataagtgagaacataggatatttggttttccatttctgagttacttcacttagcataatggtctccaactccatccaggttgctgcaaatgtcattactttgttcctttttatggctgagtagtattccttggtgaatacctactactttttttttttttttagacggagtcttactctgtcaccaggctggagtgcagtggcgccatctcagctcactgcaacctccacctcccaggttcaagtgattctcctccctcagcctacaggcacgcgccaccacacccagctaatttttgtatttttagtagagacagggtttcaccatgttggccaggatggtctggatctcttgacctcatgatccacccacctcagcctcgctaagtgctgggattacaggcttgaatgagccactgcgcctgcactacattttctttatccactcgagggttaatgggcatttaggtttgttccatatttttgcaactgcaaattgtgctgctataaacctgtgcatgcaactgtctttttcatacaaagacttattttcctttgggtggatacccagtagtgggattgctagatcaaatgatagttctacttttagttctttaaggaatctccacagtgttttccatagtgattgtactagtttacattcccgccagccgtgtaaaagttcccttttcaccacatccatggccaacatctatatgttttgattttttaattatgatcattcttgcaggagtaaagtggtatctcattgtgtttttcatttgcatttccctgataatttgtgatggtgagcatttttttcataggtttgctggccatttgtatatcttcttttgagaatcgtctattcatgtccttcactttttacttttatttgaaaaaactgttttatttgtggatgatatcaaacatacacaagagtagatataagactacatgcagccgggcgcagtggctcacacctataatcctagcactttgggagaccaaagtaggcagatcacttgaggtcaggatttcgagaccagcctggccaacatgatgaaactccgtctctactaaaaatacacaaataatttgggtgcagtggcacgtgcctgtaatcccagctactcgagaggctgaggcatgagaatcgcttgaccccgggagtcagaggttgcagtgaaccgagaacgcgccactgcactccagcctgggtgatacagtgaggctcagtctcaaaacaaaacaaagaaaagtatatccatcacccagcttcaacaatgatcaactcatggccaatcttgtttcatctgtgctcccaacaacctccttccccaactccccaaaaattgggattattttgaagcaaagcccagacctcgcataaattcacctataaatgttttcaccacatatctctaaaattatcccattttaccactggggaaactgaggcatgaagaaatcacataacttaatcaaggtcacttttctgataggagttcagagccaggatcaaagcccagctctctggttctagagcccttgcctttgactgtcttgatgcctctggaatcttagatgagagtcttttttttttttttttttttggaaagacagggtctcactgtattgcataatcttggctcactgcaacctccacctcccagtttcaagcgattctcctgcctcagcctcctgagcagctcagattacaggcaccagacaccacacctggctaattgtttgtgtttttagtagagatggggttttgccatgctggccaggctggtctcaaactcctgacctcaagtgagccacccgcctcggcctcccaaagtgctgggattacaagcatgagccaccatgcctggatgcctatatctattatggacatgtctcagtaagctgtgtgcttaaaagctttgcattctactgtatgtaggtgatacctaaaaatgaaggcaaaggagaacagattaagtgtcatatattcataacacgaattagtataaagcaaggaaaatgaatgaacaatatacaataaacaggataaatctaagaaacataattttgagcaaaggagccagacgtaaaacaatacgtattacttgttccttttgtgcaaagtgccccaaaacaggcatttaattatgcatacttaggaagtgaaatgctaaaccaatcatgaaatgctaaaatgctataaaagtgtaaaaaaaatcctttccattggaagaagggaggggatagtcatgggagaaacagtagcaggcatctggcatgtaggcaacattctgtctcttaacctgggtgtacacttggtatcaattcattgagctatattcatttgttgtatgccctttttgtattgacatttaaaaatatataattccccggccgggcacggtggctcatgcctgtaatcccagcactttgggaggccaaggagggtgaatcacgaggtcaggagttcaagaccagcctagccaacaaggtgaaaccctgtctctactgaaaatacaaaaattagctgggcatgatggcttatgcctgtaatcccagctactcgggaggctgaggcaggagaattgcttggaccaggacccgggaggcggaggttgcagtgagccaagatcgcaccactttactctagcctgggctacagagtgagactccatctcaaaaaaaaaaaaaaaaaaaaaaaaaaaaaaaaaaaaaatatatatatatatatatatatatatatatatacacacacacacacacacatatatacatatgtatatataaaatttcccatcacatctgaatcatgaaatactaagagatacatttaataaaatatgtgcaaaaccagtacactgaaaaccacaaaacattaaagaaggaaacagaataagacttgagtaaggggcgagatccaccatgttcaagaatcagattactcaatattaagatattagtgctccagcccaggcgcagtggctcacacctgtaatcccagcactttgggagcccgaggcgggtggatcacttgaggtcagaagttcgagaccagcctgggcaacatggtgaaaccgatctctactaaaaatacaaaaaaattagctgggcatggtggcacacacctataatccctagggagactgaggtaggagaacagcttgaacccgggaaatgaaggttgcattgagcagagatagcgccactgcactccagcctgggcaaagagtgaaactccatctcaaaaaataataatagtaataaaagataatagtgttcatctgtagagtaaatgaatcccagacaaaattgaaataccagcaagctttatttatttatttatttatttatagaaattgtcaagctgaggctacaatttatatggcaatgtaaaggatcaacaagagccaaacatcttgaaaaagaaaaaccagactgggcgcagtggttcacacctgtaatcccagcactttgggaggctgaggcaggcagatcacctgaggtcaggagttcaagaccagcctggccaacatggtaaaccccatctctactacaaatacaaaaatgagccaagtgtggtggcgcacgcctgtagtcccagctactcaggaggctgaggcaggagaatcacatgaacccaggaggcagaggttgcggggagccgagatggtaccactgcactccagcctgggagacagagcaagaccctgtctcaaaaaaaaagaaaaaaaaagagaaaaaccaggctggcacagtggctcatgcctataatcccagcactttgggaggccaaggcgggcggatcacctgaggtcagaagttcgagactagcctgaccaaaatggtgaaattccgtctctactaaaaatacaaaaaattagccgagtgtgggggcttgtgcctgtaatcccagctacttgggaggctgagacacaagaatcacttgaacccgggaagcagaggttgcagtgagctgagattgcaccactgcattccagcctgggtggcagagtgagactcccactcaaaaaaaaaaaaaaaaaaaaaaaaaaaagaggccgggcacagtggtttatggtttatgcctgtaatcccagcactttgggaggccgaggtgggtggatcacgaggtcagaagatggagatcatcctggttaacacagtgaaaccccgtctctactaaaaatacaaaaaaattagccaggcgtggtggtgggcgcctgtagtcccagctacttgggaggctgaggctggagaatggcgtgaacccaggaggtggagcttgcagtgagccaagatcgcgccactgcactccagcagcctggacagagtgaaacttcgtctcaaaaaaaaaaaaaaaaagaaaaagaaaagccaaatggaaggatttatattaatatcaaaatttataataaaactacagtaataggctgggcactgtggctcatgcctgtaatcccaccactttgggaggccaatgcaagagcccagaagttcacttgagcttagaagttcaagaccagcctgggcaatatagtgagaacccatctctacaaaaacttaaaaaactagccaggcatgatggcatgtgcctgtggtcctagctattcaggaggctgaggtgggaggaccgcttgagcccaggaggtctaggctgcagtgagtcatgatggcactgctccactccagcctgggtgacagggcaagactctgtctcaaaaaaacaaaaaaccacacacacacactacagtaataaaggcaaggtgtactgggattccgatagaaagagatgaatggaataaactaggaagtccataaatatgtggtcaatagaatttttttttcttagagttgggggtctcactgtgtttaacaggctggtctcaaactcttggactcaagcgatcctcctgcctcagcctccctcacctgctttcaattgattactgacaaagatgctaagataattcagtggagaaaagacagtattttctttttctttttttttcttttttttttttttttttttttttgaggagtcttgctctgtagcccaggctggagtgcagtggctcaatcttggcttaccgcaaactctgcctcccgggtcccagttcaagcaattctcctgcctcaccctcccgagtagctgggactacaggcatgcatcaccatgcccagctgatttttgtatgtttagtagagacggggtttcgccatgttggccaggctggtctcgaactcctgaccttgtgattcacccaccttggcctcccaaagtgctgggattacaggtgtgagccaccacacctggccagtattttcaacaaatggtagaatgactaaatagcctcatggaaacaaaacgaaccctgccttttacttcacatcatacacaaaaattaacttgaaataggtcagagatctaaaagtacagactaaagctaaagaacttctaaaaacatattttcaaaaccttgaagtagatctttttttttttttaacatgggactcaaaaatcactaatcataaaggaaaaaattgacaaactggacttagtcaaaaataatactttcagccaggcacggtggctcatgcctctaatcccaacactttaggaggccaaggtgggaggattgcttgaacccaggagttctaaaccagcctgggcaacgtagtgagaaccagtctctatatttaaaataaataaataaataatagtagtacttttgctcatccaaaaccagcattaagaaaatatacggaccggccaggcgtggtgactcacacctgtgattccagcactttgggaggccaaggcaggcagatcacccgaggtcaggagtttgagacctgtctggccaaaccccatctctactaaaaatataaacattagccgggtgtggtggcacacgcctgtaatcccagctactcaagaggctgaggcaggagaattgtttgaacccaggaggcaggggttgcagtgagccaacattgtgccactgcactccagcatgggcaacagagagagactccatcaaaaaaaaaaaaaaggaaagaaaggaaaagaaaagaagatatatagaccaggcacagaccagaagaaaatattcacaacacatatatctcacaaaataacccgtgcctgaaatatctaaacaactcctatggctcaataaaaaaaaaaaaaaaaaagcccaaccagccgggcacggtggctcacacctgtaatcccagcactttgggagaccaaggtggggtggatcacgaggtcaggagatcgagaccatcctggctaacatggtgaaaccctgtctcttctaaaaaaatacaaaaaattagccgggcatggtggcacacgcctgtagtcccagctactcgggaggctgaggcaggagaatggcgtgaacctgggaggcgaagcttgcagtgagccgagatcgcgccactgcactccagcctgggcgacagagtgagactgcgtctccaaaaaaaaaaaaaaaaaaaaagcccaaccaaaaaatggccaacaggctataaaaaggtgtttaatgtcattagccaacaggaaacacaaattaaaaccacactgagataccaccacacacccataagaaaggctaaatggaaatatgcaaacagcacctagtgctggcaaggatcaccagaactctcgttcatgactatgggtgtataaaacgtacaactgcttagaaaaagtttctgcaaatttcttaaaagtttagcaggccaggcgcagtggctcgtgcctgtaatcccagcactttgggaggccgacgcgggtggaacacgaggtcaggagttcgagaccagcctggccaacacagtgaaaccccgtctctactaaaaatacaaaaattagccagccgtggtggcaggcacctgtaatcccagctactcaggaggctgaggcgggagaattgcttgaacccgggaggtggaggtggcagtgggctgagaccacaccattgcactccagcctgggtgacagagtaagactccatctcaaaaaacaaacaaacaaaaaagtttggcaggccagaggcggtggcttactcctgtaatcccagcacttggaggatcacttgagcccaggacttcaagaccagcctgggcaacatcaggagaccctgtctctacaaaaacatgaaaactagccgggtgagatggtgtgcacctgtaacccagctacttgggaagctgaggtggtaggatttcttgagcccaggaggtcagggctgcagtgagccagagattgcaccactgcactccagcgtgggcaacagaacaagaccctgtctcaaaaaaaataaaattagcatcacgcaacaacatagatacatttcaaaaacattgtgctgagtaaagcaagtcttgcacacaagagtacttatggtataattctggttatttgggctgccgaggcaggtggatcacctgaggccaggagttccagaccagcctggccaaaatggtgaaaccccatttctgctaaaaatacaaaaaattagctgggcatggtggcacatgcctataatcccaactgctcgggaggctgaggcaggagaattacttgaacccaggaggtggaggttgcagtgagccgaggttgcaccaccgcactccagcctgcgcaacaagagcaaaactctgtctcaaaaaaaaagaaaaggaaatgctggttatttaacgttctataacagacaaaactaacttatgtggggaggtgggacaaaagagttgttgtttctgagacactgactgagaagggacatgaggggactttttgcggtgatgatagtgctctatcttgatgggtgtttttattatacaggtacatgcatttttcaaagcacatcaaaccatatagttatgatttatgcattttattctatgtcaattttaccttgaaaacataaagattcaattttaggtaatgatattgatattcaagtgtctgggggtgaaatgtactggtgtctgccatttctatcaagaagcatcagaaaaataggcgaggtgcagtggctcatgcctgtaatcccaacactttgggaggccaaggtgggaggatcacttgaggtcaggagttcgagaccagcctggccaacaagatgaatcccgtttctaccaaaaaatacaaaaattagccgggcgtggtggtgcatgcctgttgtcccagctactcgggaggctgagatgggagaatcgcttgaagaaaaaaggcctggcgcggtggctcacgcctataatcccagcactttgggaggccaaggcaggcagatcatctgaggtcgggagttcgagaccagctagaccaacatggtgaaaccccatctctactaaaagtacaaaattagccgggcatggtggcacacgcctgtaatcccagctacccgggaggctgagacaggagaattgcttgaactagggaggcggaagttgcagtgagctgagatcacgtcattgcactccagcctgggcaacaagagcaaggcacggtggctcacgcctgtaatcccagcacattgggaggttgaggcgggcggatcacgaggtcaggagatcaagaccaacctggctaacacggtgaaaccccatctctactaaaaatacaaaaaaaaattagccgggcgtggtggcggggtcctgtagtcccagctattcaggaggcggaggcgggagaatggcgtgaacccaggaggcagagcctgcagtaagccaagatcgcaccattgcactccagcctgggtgacagagcgagattccatcccaaaaaaaaaaaaaaaaaaaaaaaaaaaagcaagggcgaaactcaatctcaaaataaataaataggtgcagtggctcatgcctgtaatcgcagtgctttggaaggctgaaatgagaagattgcttgaggccaggagtttgaggttacagtgagctgtgatcactccatggcactccagcctgggtgacaaagcaagaaatacaaataaaataaataataaggtggtttggtgggagggtagaaggatagatatgacaaaacaaacatgggaaaatgttcattgtagaatctaagtgatgagtatgtgggtgtttattatacaattctttaaacttttctttatgtttgaaattttttcctaatagtgttgggagaaagtaacatctattctgtgagccagttatttctccctttggtatttatccaagagaaataaaaacttatgtctacataaaactttgtaagagaatgttcatcccagccgggtgcgatggctcacgcctgtaatcccagcactttgagaggccaaggcaggtggatcacaaggtcaggagatagagaccaacctggctaacacggtgaaacccaatctctactaaaaacacaaaaaattagcccggcgtggtggtgggcgcctgtagtcccagctacttgggaggctgaggcaggaaaatgacatgaacccgggaggcggagcttgcaatgagctgaaattgcaccactgcactccagcctcggtgacagagcgagactccgtctcgaaaaaaaaaaaaggaatgtttatcccagctctattattggcaagagactgtaaacagctcagatgtccatcaacaggagaatggataaacaaactcaaactgtgctttatttatacaatggactcctactcaactattgaaaaggaatgaactactaattcaaactactaaaaggaatgaactactaacacactaataacgtgagtgaatctcaaacattttgctaagtgagattcaaaaaagggtgtattatatagaattctagtcacaggaaactctagaaaaggcaaagctaatctgtggttctagaaatcacaacagtgcttgcttttcaagtgcttatgaattgggaaaaggcatgatgaatgcttctatggtgatgaacacgttctgtgtcttgagagaaatttgggttacatgggtgtatgcctttgtcataattgactgaactgtaaacctgtggatttcatggaatgtaaattatacccttttaagaaagctgattataagtgggaaaggattctgcacatgctaaaccagataatttgtcacatagtgctttgtaaggctatgtgtatcggtatggaaacactaacagagatcctagatatattgctagatcaactttctagaagttgttcaaattattggctctgttggactaaactaaatgaagcttagttttgttgatataatatatagttgatatcatagatttgttgatgtaatgtagaggaagaaatccaaagactgaggccaggcatggtggcttacgcctgtgatcccagcactttgggaggctgaggtgggtggatcacctgaggtcaagagttcgagaccagcctggccaatatggagaagccccatctctactaaaaatacaaaattagccaggcatggtggcgcgtgcctgtaatcccagctactcaggaggctgaggcaggaaaatcacttgaacctgggaggtggaggttgcaacgagctgagatcgcaccactgcactccagcctgggcaacagagcaagactccatctcaaaacaaacaaataaacaaagactgatataataaatgttggagagtacctgttaagtttagaagatcatacacaccctaacaatatctcctaaggaaacatgcctttcacaatgacattgagaaatatactggcatcagaagcactagcatctttgaaaagccctgtaacggctggtatagaggtaaaaaaattcagatggctcatttcagccattgaaatgggttcccttattccaactggaatggcacattccaggacaaaagataggaaattaaagatttgacagacaccaaacaagacacacagatagcaaaaagcacatgtaaaaatgctcaatatcacaagtaattagggaaattcaaatttaagccacaatgagataccactacataactatccaaacgactggtcatatcaaatgttggccaggagagggaggaactggaactctcatgcactgccggtggaaatgtacaatgaatggtacaaccatttttggaaaacagtatggcagttgctcaaaaagttaaacatacctttatgatccagccccttccctcctatttagtcaagagaaatgaaaatatatgttcatataaaaacttgtggcagggcaaggtggctcatgcctataaccccaacactttgggaggatgaggcgagtggatcgcttgagctcaagagaccatcctgggcaacatggcaaagccctcatctctacagaaaatttaaaaattagccaggtatggtggcgcccgcctgtagttccagctactcaagaagctgaggtaggaggatcacttgagtctgggagatcaaggctgcagtgagctgtcattgcaccactgcactcctcctggggtgacagagcaagaccctgtctcaaacaacaacaacaacaaaaacttgtagtctgggcgcaatggctcacacctgtaatcccagcactttgggaggccgaggtgggtggatcacgaggtcaggagatcaagaccatcctggctaacatggtgaaaccctgtctctactaaaaatacaaaaaaaaaattagccaggcgtggtggtgggagcctgtagtcccagctactagggaggctgaggcaggagaatggcatgaacccgggaggtggagcttgcagtgagccaagatcacactactgcactccagcctgggcaacagagcgagactctgtctcaaaaataaatatacaaaaaaaaacttgtatacaagtgttcatagaagctgcatttttaatagccaaaaattgaaaacaccccaaatgttcatcaacaggtaaatggataaacaaactgtggtacatctgtacaatggaatactacttggcaatcaaaaggaatgtactattgatacatacagcaacatgaatcaatctcagaataattatgttggactcctccccccaaaaaggaacatactatatgattccgtttatataagactcaagaaaatacaaactaatctatagcaatagagaacaaatcagaggttgcttgaaaaatagggatgggagtgtaagtgggtgggagagattacaaaaaaatacaaggaaatgttgagattacagaaatgctcatttaaatatgagcagtggaagggcgtggtggctcacacctgtaatcccagcactttgggaggccaagtggggaggattgctggagtccaggagttttgagaccagcctgagcaacatggcaaaaccctgtctctaaaaaaaccaaacaaacaaaaaaactagcgaggcatggtgtacatgcctgtagtcccagctacttgggaggctgatgtgagagaatcaaaataaataaataaataaatatgagccatttgttttatgtcaattataccttgataaagttttttttagtgactttgggaatataacaaccaaacacagtctcagggcttttttgcattctgttttgaacaaagtaaccaaaaatgacttttctgagatcattggagaagtatgaatatggactgagtgttagatgaaattaaaggaatattatttttgctagctggaataatggcatgatggtactgctaaactttttatcattaagcaatgcatactgagatagttatggggcaaatatctgggattgtttaaaatgcttcggaaaacaggaatacataaaataagctgaggagaatgctgataattggtgaaactaggtgataggagtttattgcattcttctccctacttttgtagatatctgaatgtcactttcataataaagttagaaacaggctgggcgtggtggctcacacctctaatcccagcactttgggaggccaaggcaggaggatcgcctgagcccaggagttcaagaccagcctggccaacatagcgaaaccccatctctactaaaaatacaaaaatcagccaggcatggtggcatgtgcctgcagtcccagctacttgggaggctgagacacaagaattgcttgaacccaggaagcagatgttgcagtgagctgagattgcaccactgcactccagcctggatgacaaaagtgagactcttgtctcaaaaaaaaaaaaaaaaaaaaaagactcgaataaaataaaaagaatgactcctagatctctaattctagcaatcagggtatggtaataccacttaccaagatgcatgggagataaacaggttcagaggaaatcaagttctcattaagggccacattaaggttcataaagaacctttgggccaggcgtgttagctcatgcctgtaatcccagcactttgggaggccgaggtgggcagatcgcttgaggctaggagtttgagaccaacctgaccaacatgataaaaccccatctctactaaaaatacaaaaattagccaggcatggtggcaggtgcctgttatcccagttactcaagaagctgaggcaggaggatcacttgaacctgggaggcaaaggttgcagtgagccaagatcatgccactgcactccagcctgggcaacagaaaaaaaaagatcagcaaaaaaaaaaaaaaaaaaaaaaaaaaggctcacagggcggagtctgagggagatcccatgagctgccacctgtcctctttcagtggacttgtgtggagagggctttattccccagcaagaagccatgacaagcatggagcacttccaaccaggaaaactcacccaagctctggtgtccaaggtgttcactgggggtcagttacataggcagagagcacccaagtgacaactcctcagtctccagcccacagaggtcaaactaacacagtgttgcccaaagccccaggtatgcaaaaacagacaccatgagtcatggtgttagcataaactatccctctgtcccacccaaggcccagatgtgtacagatactgttatcaggcaggatattccaaaggcttagagcttaaggagtggtcaagggccagtttttttctttggaatgttcaatacttaaggacccatgccagcagagttaaggctttactgcacgtggccctacttctgccaatgaacttggagcttacgtagcatcttttttttttttctttttgagatggagtttcgctctttttgcccaggctggactgcaatggcacgatctcggctcaccgcaacctccgcctcctgggttcaagtgattctcctgcctcagcctcccgagtaactgggattacaggcatgtgccaccatgcctggctaattttgtattttttagtagagacagggtttctccacgttggccaggctggtctcgaactcccgacctcaggtgatctgcccgtcttggcctcccaaagtgctgggattacaggcgtgagccaccgtgactggccatagcatcttaataaagaacaataaatttgtttgggaggctgaggcaggagaatcgcttgaacccaggaggcggagtttacagtgaaccaagatcatgacactgcactccagcctgggtgacagagttggactccagatcaacaccaacaccaacaacaacaacaaaaaaaaaaaaaaaaaaaaaaaagaacaataaatttgtagagaatgacaagacacaggaaaagaacttttgagcttccgggcacagcaaattgtgggaagataaatatattgggcaactagtggaagataagggctggctcataaggtttgttatatagattcccctcctgccatctgtgggctgataagagtctagagattgtattggctattaagaaatcatcctgcccttcttggtagagaaggggagggcagagttctttcatgtgtctgctttttctcaactgtcttcagctcaaaataatgcttatgctggggtggcaaatttgaggtaacacactctcaaccccttcacccatcaatctaaggtgaccaggaactaacttgtagtctaacaaagccaggttcactgacccatttcaatgagggagaatgcacaccagaaccatggggcatctcaccaaacaaaggaaaagattggccaagcaaggtggctcatgcttgtaatcccagcactttgggagcccaagacaggaggatcacttgaggccaggagttcaagaccagcctgggcaacatagtgagaatccctctcttaaaaaaaaaaaaaaaaaaaaagttttttaattagccaagtgtggtggtgcaccttaattccagctactcaggaggctaaggcaggaggactgcttgagcccaggagttagaggctgcagtgagcctgtgattgtggtgatggagtgagaccctgtgaaagaggataagggggcagtggggaaggaaagggctgggaggggaggggaggggaggggaggagaggggagggagaggagaaagaaagaaagaaaagaaaagaaaggaaagaaggaaggaaggaaagaaagaaggaaggagagaggaagaaagaaagaaaaagagaaagaaaggaaggaagaaaaagaaagaaagagaaagaaagaaagaaagaaagaaagagaaacaaagaaaagaaaagaaagagaaaagagggaggagaggtaaggggaggggaggagaagaggtcagttcaagaccagcctggtcaacaaggtgaaaccccatctctactaaaaatacaaaaattagccagcatggtgctgctaatcccagctactcaggaggccgaagcaagagaatcacttgaacctaggaggcagaggttgcagtgagccgagatcacgccactgcaaaccaacctgggtgacagagtcagactccgtatcaaaaaaagaaatgaaataaattaattaattaagtgaaatgaaaataatttgtggatacaaggaaaaaatttaaaaattttagaaaaagaaaatgttacctacttctcagtggtatgtgaagatttagcaagacgtgtaggcaaagagctgaacacaagtccttataggacgcccttaacaaatattagctattgttgttatcgatatcagcattactttcacacagatatttttgatcaactgaaagcaccacccacctccacacacattaacccagagcaatgtattgtcagtgcttgagagaaagggctgactgggtgcggtggctcacgcctgtaatcccagcactttgggaggccgaggcaggcagatcacctgaggtcgggagttcaagaccagcctgaccaacatgtaaaaaccccaactctactaaaaacacaaaattagccaggtgtggtggcacactactgtaatcccagctactcgggaagctgaggcaggagactctttgaacccgggaggtggaggttgcagtgagctgagattgggccattgcactccagcctgggaaacaaaagcaaaacttcctctcaaaaaaaaaaaagagagagagaaagggctttgttgccacaacatgtaagttcagtcctagttcatttgcttccgagctgtgtgaacttaagcaattgtgtcattttcctgagcctcagtttccttatctgtaaagtgggaatcatatttctctcgggatttctgagaattaaatagaatcatattattattctctcttccactcaagccatttctgtctccctgctcccgcaattcctaaaccttcccacctcagctacagctcacagcgcctcctggaggcctggagggtctgatccttggagggggcgcaagaatgggagagtggataaggggcagggtgctgggctggagagggctggagagccctgggatgttacctgttctcactggaggagaccaaaggcacatttagcctgatggggggtgaggggttgcccctgtgcgagttatatctgcatgggtacttctgtgtgtgtttgtaggtaaagggcagttaaaagtctgggatgactggaaatctggaacctgaagtctttggagaatgaaaaagagtggttgtgcatgagtccctcagcagtataacaggggtaggttattctgaaatattagatataaatatagaatatgaatatattagcatagatgtacagataaatgatgtatacttatacaatagaaagatgatttagggctgggcctggtggctcacgcctgtaatcccagaactttgagaggccgaggcaggcagatcacctgaggtcaggagtttgagaccagcctggccaacatggagaaaccccgtctccacaaaaaatacaaaaattatcggctgggcgcagtggctcacacccgtaatcccagcactttgggaggcggaggcgggcacatcacgaggtcaggagatccagatcatcctggctaacacagtgaaaccccgtctctactaaaaatatttttaaaaaatagctgggcgtggtggcaggtgcctgtagtcccagctactcgggaggctgaggcaggagaatcgctttaacctgggaggtggagcttgtagtgagccgagatcgcaccactgcactccagcctgggtgacagagagagactccatctcaaaaaaaaacaaaaaacaaaacaaaaacaaaaattagcctggtgtggtggcacatgcctgtagtcccagctactcaggaggctgaggcaggagaatcacttgaacccaggaggcggaggctgcagtgagctgagatcaaacgactgcattccaccctgggtgacagagcgagactccatctgaaaaaaaaatgattatttagatagataatatagatataaagataaattatatagacataaatggtaaatagatgattcaaatatagatgatataaatatagtatagacgtgatatgaatatagaaatggatatagatgatacagacaggaaaaagcagacacataattatgttaatatctttaactactggccggcgtggtggctcacgcctgtaatcccagcactttgggaggccgaggtgggcggattatgaagtcaggagatcgaaaccatcctggctaccacggtgaaaccccatctctactaaaaatacaaaaaaaatttagccgggcatggtggtggacgcctgtagtcccagctactcaggaggctgaggcgcgagaatggcgtgaacccaggaggcggagcttgcagtgagccaagatcgcgccactgcactccagcctgggcgaaagagcaagactctgtctcaaaaaaaaaaaaaaaaaaaaaaaaaaattctttaactactgagatcttcggcttgggaaaaatggggtcctaatgtacagtttttatagagaaggcaagagacaactgggcatggtggctcatgcctgtaatctcagaactttgggaggctgagccgggcagattgcttgggcccaggagttcaagaccagcccgaccaacatggcaagactctgtctctacaaaaaatattaaaaattagccaggtatgatggtgagcacctgtagtcccagatactacagaggcggaggcatgagaatcacttgagcctgggaggttgaggctgcagtgagccatgattgcgccactgcactccagcctgggtggacagagtgagaccctgtcacaaaacgaaaagaaagaaagaaaaaaaaagcaagagacatgcctgattctttcctttacttactagttttcacaataatgagttggttccttagtgtccttcaaaagtggcctgtgaggttcggttcttttgagtatcaagatgttggcagagcactgtggctcacacctgtaatcccagcattttgggaggccaagacaggtggatcacttgaggtcaggagtttgagacaaccctggccaacatggtgaaaccctgtctctactaaaaatacaaaaattagtcaggcatggtggtggatgcctgtaatcccagctactcaggaggctgagccaggggaatcggttgaacctgggaggtggaggttgcagtgaaccaagatcatgccactgcactccagcctgggcgacagagtgagactccctctcaaaaaaaaaaaaaaaaaaaaaagatgctgattccctgacatgttggatcatggctatgtcagaatctagggataaaatactaacaagtgcttggaagagtaagtaaatgaaagacaagacagtgattgacttcaggataaacaagcccgtatgagaaaggaaatgccatcactgaatagttcactacacggcctaactgtggactcttatctattgcagagtcatcgtcatgcaagcattcaacattgatttaactagacatagtgataaatgtccaggcgtggtggctcacacctgtaatcccagcactttgggaggccgaggtgggtggatcacctgaggtcaggagtttgagaccagcctagccaacgtggcaaaaccctgtctctactaaaaatacaaaaattagccgggcatggtggcgtgtgcctgtaatcccagctactaggggggctgagcaggaggatcacttgaacctgggaggcagaggttgcagtaagctgagatcacgctactgtactccagcctgggcgacagagtgagactccaaaaaaacaaaggaaggaaagaagaaagaaaagagagagagacagagagaaagaaagaaagaaagaaagaaagaaagaaagaaagaaagaaagaaagaaagaaagaaagaaagaaagaaaggagggagggagggagggagggagggagggagggaagctaaacagagcaactgtgggagaggaagaaaatgagcactaaagggagttctccccaaaggtttcccaaagtctgcttcttggaggaattctatacaagactgaggtccctaaatctcctagatccaggcatagtaggctgaataacgccaccccaccccgcccgaagatgtccacaccctaatgctcagaacctgcgaacacattccccgacatggtaaatgaggttttgcggaagtgattaaggatcttgagatggaagggtcattctggattagctagtggacccaaggtaatcacaagcatccttctaacaggagagcagaaaggtcacagtcaggctgggcacggtgactcacgcctgtaatcccagcactttgtaaggcgaaggtgggcggatcacctgaggtcaggagttcgagaccagcctggccaacatggtaaaaccctgtctctactaaaaatacagaaattagccagtgtggtggcgtgtgcctgtagtcccagctactcaaatggctgaggcacaaggatcacttgaacctgggaggtggaggctgcagtgagccaagattgtgctattgcattccagcctgggtgacagagcaagactgcatctcaaaaaaaaaaaaaaagaaagaaaggtcagagtcagagaagatgtgaccactgaagcagagactggagtgatgcagtcagaagccacggcatggaggcagcctccagaggctgggagaaaaaagtgacagattctccactgaaacctccagaaggatccagccctgctgacacttgactttagcccgttaaggttagcttcagacttctgacctccagaactgtaagataataaatctgtgttgatttacaccactaagtttgtggaaatttgttaatggcagcaatagaaaaataataacaccatcggccgggtgcagcggttcacgcctgtaatcccaccactttgggaggccaaggtgggcagatcatttgaagccacgagttcgagaccagcctggccaacacggtgaaaccctgtctctactaaaaatacaaaaatcagcccagtgtgatggtgcatgcctgtagtcccggctactcgggaggctgagacaaaggatcccctgaacccaggaggtggaggttgcagtgagctgatcccaaagtgctgggattacaggcgtgagccaccgcgcccagacccctgttttttttcgtttgtttgtttgtttgtttgtttgtttgttttgaaacagagtcttgcttttgttgcccaggctggagtgcagtggtgcaatctcggctcactacaacctctgcctcccgggttcaagcgattctcctgccttttcatctcggccttccaaagcactgtgattacaggcatgagccactgtgcctggcctatttatttatttatttatttctaagatggagtttcgctcttgttgcccaggctggagtgcaatggtgccacctcggctcactgcaacttccacctcccgggttcaagcaattctcctgcctcagcctcccagtagctgggattacaggcaggtgccaccacgccaaactaattttgtatttttagtacagatggggtttcaccttgttgattaagctggtctcaaactcctggactaaagcggtccacccacctcagcctccccaagtgctgggattacaggcatgagccaccgctcccggccctggagtagcttttatgtggcaacaggagttagaaatccttctgtcctaaacagctcaggctcccacaacatactatatattgtctttctcttagtctttgcccaggctctccctgctccctctgtggttgcagttagggttcattcttggtccagggttaagattcgttccaaggcctggaacagcagtcagtctgtacctgtggtcaggacacaaactgataacttttactttcctggaatgtctactgatcctgtgacattgtccggcccctgctcattcaggtgctggaagagaatgcaaactattggagcctctggtttaggtttcctcaaggtcatctcagccatacccctgtctcctagagaaatttctcaagagattaagggactcattcaacttggcacataccttggttgccttaggtacttctttatcttcaaaataaattgtgccaaagtcctagatatcagaatgtcaacagggagaggttcccacccaggcctcccgtttccgcttgcaccttgcacctgttgggcagatgactttgcgcgagtcacttcctgactctggccctaaaacttcttttgtaaaacaaagggcatgggtcagagggtctctaatggggtcccaagattaaaatttcacagttctgagtgtctagagtctccaggcagtgtggtaccagctctggattcagagagacccaggtttgagcccaaagcctgggagttactgactggctggccgtgggaaagtgacggaacactcccaagcctcggtttcctcacgtgtaaaatgggaattaactaaggcaatgcctctcaaacacttggcacagcccctggcatggcatacagtccatgccattgctgttgagtttgtaatgattatatataattaagtctgtgctgacaatacgtagctacgtaggaccaagcatccagcagaacgcacagtccgagacactctaggttgtggtagtaactgctgtaaaataactcctttattattgcacgtcagaataggcaagagagtgtaacacagaaaacatcagctactcttcagggtggtgactgctccttagtctaggtatgtacacctggaagggtccgtgaacattttccatgggagagatggatacagagataagttaaaggaaattgccgggcgtggtggctcacatctgtaatcccagcactttgggaggtcgaggcgggtggatcatgaggtcaggagttcaagaccagcctgactgaattggtgaaaccttgtctctactaaaaaatacaaaaattagctgggcttgatggcgggagaatcatttgaacccaggtgacagaggttgcagtgagccaagatggcgccactgcacgccaagcctgggcgacagagtgagactccgtctcaaaataaataaataaataaataaataaataaataaataaataaaggaaattaatgcccaaatcctcacctttcaattgaacagttccccgaggagacctgcctgaaaatgccccagttgtataggaatgatttacccatatcctgtttcacttttcacccatcactcactttttctttttctttcctttttcctttttctttcctttctttttttttttttttttttttttttttgagacagagtcttgctctgtcgcccaggatggagcacagtggccccatctcagctcactgcaacctccgcctcccaggttcaagtgattttcccgcctcagcctcccaagtagctgggattacaggcgcacacaaccactcctggctaatatttgtatgtttagtagagatgggttttcaccatgttgcccaggctggtctcaaactcctgacctccagtgatctgcctgcctcagcctcccaaagtgctgggattacaggcgtgagccactgtgcccagactttctctttttctttttttttttttttttgccagaaagggtcttgctctgttgcccaggctggaatgcagtggctcaatcttggctcactgaagcctcaacttcccaagctcaagcaatcctcccacctcagcctcttgagtagctggaatcacaggtacgtgccaccacacctggctaatttttttttttttttgtaaagacagtgtctcactatgttgcccaggctggtcttgaactcctgggcccaagtgattctcctgcctcagcctcccaaaatgctggggttactggagtgagccaccatgcctggccccactttttactcacttttttgttcatttgtttgttcccacttaaaaaaaaaaatcctacctctcttccattttcagtacatgctctcagtgctgaaatcctctggtgaccaaatagagacatctagaacattaatagtggtgttaggaggaattcaattgactgggtaataaatccgccttcaagtctttgcttttcaatgttttgttttcaatactttgcagtcaacaaaactagaagaggacctagagcaattgccagctgaggagtcattcaactatattttgaagataggtgaccattgatttttggcatatagcttagaaggagttaaaagaattaagggacattgctatactgatattctttggattcccatctatttaattatgtgaacacattttctccaagcttgcatcaccaggggggtagacaatgaaagtttttctttttttcttttttttttttttgagacggagtctcgctctgtcgcccaggctggagtgcggtggcgcgatctcggctcactgcaagctccacctctcggggttcacgccattctcctgcctcagcctcccgagtagctgggactacaggcgccggccgccaccacgcccggctaattttttttgcatttttagagacgggtttcaccgtgttagccaggatggtctccatccgcccgcctcggcctcccaaggtgctgggattacaggcatgagccaccgcgaccggccgaaaatttttcaataaaaataaacttaaagaataccagcgcttccgccacggctgccattggagagcagcagccatggctctgcgcgaccctgtggccgtgggccccaaggtgaccaaggacgtgagcaagcccaggcacagctgccgccccggacgtctgaccaaacacaccaggtttgtgcgggacatgatccgggaggtgtgtagcttcgtctcgtacaagcggctcgccatggagttgctgaaggtccccaaggacaaacggtccctcaagttcatcaagaaaaggatggggacgcacatccgcaccaagaggaagcggaaggagctgagcaaggtgctggccaccatgaggaaagctgctgcctagaaagactgagccccctcccctgccctctccctgaaataaagaacagcttgacaggaagaaaaaagaaaaaaaaaccagcaacaattttatgtcaaaagtttgaagattagtgaacacattccttagaaaaataggccaggtgcggtggctcactcctgtaatccctgcactttgggaggccgaggtgggcggatcacctaaggtcaggagttcaagaccaacctggccaacacggcaaaaccccatctctactaaaaatacaaaaaattagccgggcgtgttggcaggcgcctgtaatcccagctacttggaaggctgagacaggagaatcgcttgaacccaggaggtagacattgcagtgagccgagattgcaccactgcactccagcctgggcaacagagcgagactccacctcaaaaaaaagaaagaaaaataaatacaacttgccaaaatggacacaaggagaaacaataaatatgaataatgctaaaatgattaaagaaatcaagtctaaaattaagtatcttccctccaatgtttatgataacccactagtgaaatttaccaaatatctaaggaagaaataatgccaatctcacataaactcttttatggtatagaaaaagcacagttttataaggcaggcagaaacttaattgccaaaacctgcctaagacaatataagaaacgaaaattacaggccagtctcactaccaaacttggatgtaaaaatcatacataaaatagcagccaggcacagtggctcatgcctgtaatcccagcacttgaggaggccaaggtgggtggatcacttggggtcaggagttcaagaccagcttagccaacatggtgaaaccccatctctactaaaaatacaaaaattatccaggcatgctggcaggtgcctgtaatgcaagctacctgggaggctagggcatgagaatcgcttgaacccaggaagcagaggttgcactgagccgaaatcacgccactgcactccagcctgggtgacagagcaagactccgaaaaaacaaaaactaaataagaggacttactctacctgatatcaaacttactagggagctatggtaattaggacagtgtagaattacccaaacatgaacagagaccaatggaagagattagtcagcccaaaataagaacccacttctggttgatgccaaggatggtattacagaaccatgaggaaagggtggtcttttccataatgagactgagacattgaatacctttacggggaaaaaggaaattcgaaacctacctgacatcacatcaaatattaattccagatggatcatatatctcaatgtgaaaagctaaacaataaaagctttaacagataatctagaagggtatctttatgcccccaagagagaaaaagtgttcttaaaaatgacacaaaaaagcacaaacattactgaaaagattgataaattggactacattcaaatgtagttcatcaaagacaccaggaagggctgggcgcagtggctcacgcctgtaatcccagaactttgagaggctaaggcggcagatccctgagatggggagtttggcagatccctgagatggggagtttgagaccagcctgaccaacatggagaaaccccatctctattaaaaatacaaaattggctgggtgtggtgtcacatgcctgtaatcccagctactcagaggctgaagcaggagaatccctttaacctgggagccagaggttgcggtgagccgagatcgcgccattgcactccagcctgggcaacaagagcgaaactccaattcaaaaaaaaaaaaaaaggcaccaggaaaagagtaaaacagggccgggcacggaggcccacgcctttaatcccagcactttgggaggccaaggcgggcggatcacttgtgtccaggagttccagaccagcctggtcaacatggtgaaaccccgtctctacaaaaaatacaaaaattagcccagtctggtggcatgcgcctgtagtcccagctacttgggaggctaaagtgagaggatcactggagcttgggaggttgaggttgcagggagctgagatcgtgccactgcactccagcctgggcaagagagtgagaccttgtctcaaaaaaaaaaaaaaagaaagaaagaaaattgtaggtgaaggtagaagtatctccagtgatcttcaagactggcacaatattctaaaaagatacatttgaacataaaaataaatgttaaccagacatcgtttttagaattatacaatacaaattctggtggggagttggctgagagcccctcctccagcttcctggtggtggcggtgttccacctcctgggtccccaccctcagtctcccttgctctgccttctcccccaccccacctccacatgctagaaaccaggtcctcttctcaccctctctcccaggtgagcctggtcactcacagagctgcagaatctgctgtctgtctgccaaggactcccaactctgtgtccacagcaaggatctgtgctaaaccacactggccttgctgggcctccagcgccatacactccctcttatggcttgtaacaggtgtttccccacctggaatgtttgctctcctctctcctccaaagtcctgcccctccctgaggtgagaaatcagttcccccacctcccccacagccccagcactctgtgctgaaatcatcatcaaaaaccctggtctcctccaatccctcctgctaccctctcagccacccaacatgctattccccctgcaggaacactcttccccatgatctttctcgagtcattcttcagatccatgtatcccctcctccaggaagccctccctgatactcaccactctccggccagggcaggcacttactctgggctcccacaggccccctggcctcccccatcccagccccgaccactctgggcagtcaaggtctggtgactaacctgcctcctcaactggactgtgggccccatgggggtagggctgtctctgtctctactgcctccccagcatcacccagtcaggcctggatgcaggcctggcatcaactctgcataaaggagcggaggtcaggagttccctggggcctcagtgcctggcactggtggaggggctttctgcatgccacactctggatcttctccagctactccttattctggaagctgcagcatgttgaaataaaaactggaactaaatggagatggaatggacttcacatttggacacatgggtgtgtaaagaggaacgtgacttctccaaagtaacgcatagaggccgggcgcagtggctcacgcatgtaatcccagcactttgggaggccgaggcaggcagatcatttgaggtcaggagttcgagaccagcctggccaacatggtgaaacgccatctccactataaatacacaaattagctgggcatagtggcacatgcctgtaatcccagctactccggaggctgaggctgaagaatcacttgaacccaggaagcagaggttgcattgaaccaaaatcgcaccactgcactccaacctgggtgacagagcgagactccgtctcaaaaaaaaaaaaaaaaaaaagtaacacactaacctcctgacccacccagagtgggtcttaccttctagaaagatagaaaagaatagaaccaggccaggctgactctggcagctttagaacaatagtaatggcaggagtggccggcgatggacagctgggggtgggactgaaatagacagcagccagggaatagtgggttgaagggagaaagggagttatttttctgtagtctttgaaattttatttttctctttccttttttggagacaaggtcctgctcttttgcccaggctggagggccatggcgcgatcatggctcactgcagcctcgaacttgagcgatcctccctcctcagcctcccaagtaggtggaacttcaggcgtctgccaccacacccagctaatttttaaattttttaaattttttctagagatgggggccttgctatgttgcccaggctggtctcgaactcctgagctccagcgatcctcccaccttggcctccgaaaggcctgagccaccgtacccggctgaaatttgtaatcaacccataatcatctattacttatgtaactgaattcctatgaaaagcataataaagtggagatcataaaggtgccgacttcgggctgttgtaagatttcggtgccacacctagcacagaaaaagcatggagagcagaagggcagtgaacgccagctggcacacgttggctacgtgcaagtattcgcctaaacgctgcgcaggtattcatcatatgatccccataaacctctgagggctgcactcacatgtcatccccgatctgctgatgagaagttcagttataggcccaaggtcacatatcccgagccagcgtaaaagtggaatccagggaggaggaggaggaggaggagcaggaggaggaggaggaggaggaggaggaggaggagaagaagaagaagaagaagaagaagaagaagaagaagaagaagagaaaggattactgtccgtctctctctggttctctgcacacccctcacctccagggttttcagtctgtctctggaccattctccttctctccccctgccccattctccaaaagcccaatggggtgacttgcaggctgggggcaccccctggtgcctgtgtgccgagtgcagaaagtcagggcggtacagggtggaggcaggtgagagtgtgggggtggtttgggtcccaccgagatatggaaaggtgggtatcagagtagagtgcactcattcatttcttcatcatcacagcccagagggtccactctgttctgggagtgttggggggtaggagtggagcaaaacaatgcccccagacgaagagagcagtgggagaaggagagaaggagcatcccagagccatagacacttaggggctgtgtgactctgggcaggtgacctagggtccttgaacctcagtttcctcatctgaagatggagatgatatgttagtatctccctcagagtattaatggatgctaggtacagttataagcttcatttacagatgaggaaaactgaggttggacaacttggccagtcacataaaagacgcagtggggtgctccctcagcaccactctccggctaagaattctggctgcagaggaggatggactccaggagaaagaacaggccgccattcccatggttcagcatggacatcggtggaatgctgttaaattggtctgttttgaggccgggagcggcggctcacgcctgtaatcccagcactttgggaggccgaggcaaatggatcacctgaggtcaggagttcgagacaagcttgaccaacatgacgaaaccccgtctctactaaaaatacaaaagttagctgggtgtggtggtgcgcacctgtaatcctagctactcaggaggctgaagcaggagaatcacttgaacccaggaggcggaggttgcagtgagccaagatcgcaccattgcactccagcctgggcgacagagcaagactctgtctcaaaaaacaaaaaaggaaggaaaagaaagaggcagtggtgttagcagggcaatgagttgaattccagtaactccggttcccctgggtttccaacccccagacctcaagcttgggcctccacactcctctccatcccatcccccaaacatgttcctgctaaactgttaagctccagttcctgcctatcccaccacttacccaccacccctcttctactccccctgtctccactaacctgccgatccacatattttcaacagccaagatcgctctcgacctgtgagcaggaagccagttgttgagacaggtacactttcatcccgtttaatgactgtgtcttcctcatctcatggcagtgtgaggcacgggcacacaggcctagggaaggcagacaagccctgtccctgcactcgccccactttgggctaggagaggaaaccagctcagacaaataatctcagatgcccgctgtttcaagatcctctggctgcagaggggagggtggaggggagcggaacctggaggcctggggctctgagaggagaatgggtggggcctagatgggaggggaaagagccagaatagaatgtgtggagggcagaagcgggcagatcaaagccaaatgctagaggcagaagaaaacagaaccccatgactcaggcgtttgaaatgaggaaattctcaacccagatagatgcagaactgattctaagaggaaaagattagaaacaacctagagatctgatcagatgggaaattaaatggatggagaggtgtgccaaagccttctctgaaacacctcccaggcattaaaattagtgatccagagccagctgtatggatatgaatgaatcttaaaagctgaaggacaaaagccagttgcagaagaagggatgtggactgtgtgctgtcctgggcataaagttgtttttttttttttttgagacagagtcttgctctctcacccaggctgaagtgcaatggtgcgaactcggctcactgcaacctccgcctcccaggttcaagcgattctctagcctcagcctcccaagtaggtgggattacagccgcctgccaccacgcccagctaatttttttatttttagtagagatggggtttcaccatattggacaggctggtctcgaacttctgaccccaagtgatccacccacttgggcctcccaatgtgctgagattacaggtgtgacccactgctcgcagagtgcataaagtttttaagcctgcaaaagaatgttttcccaggccaggcacggtggctgacacctgtaatcctagcactttgggaggccgaagcaggcagatcacttgaggtaatagagttcaagaccagcctggccaacatggtgaaaccctgtctctactaaaaatacaaaaattagccaggcttggtggtgggtgcctgtagtcctagctactcaggaggctgaagcaggagaatcgtttgaacctgggaggcagaggttgcagtgagccgagatcttgccactgcacttcagtctggacaacagagtggaactccatctcaaaaaaaaaaaaaaatccacttgttctctgggtgcagtggctaatgcttgtaatcccagcactttgggaggcctaggtgggcagatcacatggccaggtattcgagaccaacctgaccaatatggtgaaaccccatctctactaaaaatacaaaaattagccaggcgtggtgggcacctataatctcagctactcgggaggctgagacaagagaatcacttaaacctgggaggcggagattgcagtgagccgagatcatgcctttgcattccagcctgggcaacaaagcaagactccatctcaaaaaaataaaaataaaaataaagaacgttttcccaaataattgtgtgtggttgcacaaatatgcaggaaaacaatcagaacgtacctggaaatattaattataagatagtgcctcccgctgggctcagtggctcatgcctgtaatcccagcactttgggaggctgaggtgggcagatcacaaggtcaagagttcaagaccagcctggccagcatagtgaaaccccatctctactaaaaatacaaaaattagccaggcatggcggcatgtgcctgtaatcccagctactctggaggctgaggcaggagaattgcttgaacctgggaggcggaggttgcaatgagccaagatcacgccactgcactccagcctgggcgacagagcgagactccgtctaaaaaaaaaaagacagtgcttcccctgtaggagggagagaaggatgtgacgtttcagaagggatacagggaaccccaaacccggtcatgagtattttatttctctaaataaataatggtaaaaatgttaagatattgtaaagataggtgtgtatgtataatcgtggtaattcctctaatcctttctccatgtctgtatttgaaataattattttcaaggccaggcgcggtggcccacgcctgtaatcccagcactttgggaggctgaggcgggtggatcacttgaggccaggagtttgagaccagcctggccaacatggtgaaaccctgtctctactaaaaatacaaaaattagctgggcatggtggtgtgtgcctgtagtcccagctactgggaaggctgaggcaggagaatcacttgaaccccggaggcagaggttgcagtgagctgagatcatgccaccgcactccagcctgggcgacagaacaagactccatttcaagaaaaaggaataattatttttggctgggtgcagtagctcacgcctgtaatcccagcactttgggaggccgaagtgggcggaacacctgaggtcaggagtttgagaccaacctggccaacatggtgaaaccctgtccctactaaaaatataaaattgcttgaacctgggaggcagaggttgcagtgaactgagaccactccactgcactccagcctgggtgacagagcgagactctgtctcaaaaaacagtaattattattatttttaaaataacatatattttggaggctgggcacagtggctcacgcctgtaatcccaacattttgaggggccaaggagggaagatggcttgagccagaagttcaagacaaccctgggcaatatagtgagacctcatctctacaaaacatttaaaagttggccaagtatggtggcatgcacccgtagtcccagctatctacaaggctgagatgggagggtcacatgacccgggaaggtggagggtgtaatgaccccaccaaaacactgtactccagcctgggcaacggttcgaaatcctgtctcaaaaacgtatacttggttgagcacggtggctcacgcctgtaatcccagcactttgggaggccgaggcgggcggatcacgaggtcaggagatcaagaccatcctggctaacacggtgaaaccccgtctctattaaaaatacaaaaaaattagccaggtgtggtggcgggcgcctgtagtcccagctactcagaaggctgaggcaggagaatggcgtgaacccgggaggtggagcttgcagtgagccgagatcgcgccactgcactccagcctgggcgacagagcgagactccgtctcaaaaaatatatatatacttttgaaatacctttttttttttttaataaggggactggagggggtggaaccaggtgatagttggatacagagggagatgaaggaaaggaagcaaaagctgtcccccaggagacccgaaattttatttttctcaacttatggttgccttcctgatatgaatttgtaggagcagtgccttatttttttcttcttgcaccctcacccagctacgaagagtagtacttagaaaagaacttttaggcctggtgcagtggcttacgcctgtaatcccagcactttgggaggccaaggtgggtggatcacttgaggccaggagttcgagactagcctggccaacatggtgaaaccccaattctattaagaataaaaaaaatggggccggtctccagctcctaaccgcgagtgatccgccagccttggcctcccgaggtgccgggattgcagacggagtctggttcactcagcgctcaatggtgcccaggctggagtgcagtggcgtgatctcagctcgctacaacctccatctcccagccgcctgccttggcctcccaaagtgccgagattgcagcctctgcccggccaccaccccgtctgggaagtgaggagcgtctctgcctggccgcccatcgtctgggacgtgaggagcccctctgcctggctgcccagtctggaaagtgaggagcgtctctgaccggccgccatcccatctaggaagtgaggagcgcctcttcccggcagccatcccatctgggaagtgaggagcgtctctgcccggccgcccatcgtctgagatgtggggagcgcctctgccccgccgccccgtctgggaggtgaggagcgtctctgcccggccgccccgtctgagaagtgaggagaccctccgcccagcatccgccccatctgagaagtgaggagcccctccgcccggcagccgccccgtctgagaagtgaggagtccctctgcccggcagccacccagtctgggaagtgaggagcgtctccgcccggcagccgccccggccgggagggaggtgggggggtcagccccccgcccggccagccgccccgtccgggagggaggtgggggggtcagccccccgtccgggagggaggtgggggcggtcagccccccgcccggccagccgccccatccgggagggaggtgggggggtcagccccccgcccggccagccgccccgtccgggagggaggtggggggtcagcccccctcccggccagccgccccgtccgggaggtgaggggcgcctctgcccagccgcccctactgggaagtgaggagcccctctgcctggccagccaccccgtccaggagggaggtgggggagtcagccccccacccggccagccgccccgtccgggagggaggtgggggggtcagccccctgcccggccagccgccctgtccaggagggaggtgggggggtcagccccccgcccggccagccgccccgtctgggagggaggtggggtcagccccccgcccggccagccgccccgtccgggaggtgaggggcacctctgcccagccgcccctactgggaagtgaggagcccctctgcctggccagccaccccgtccaggagggaggtgggggagtcagccccccacccggccagccgccccgtccgggagggaggtggggggctcagccccccgcccggccagccgacccgtccgggagggaggtggggggatcagcaccccgcccggccagccgccccgtccgggagggaggtgggggggacagcccccgcccggccagccagcccgtccgggagggaggtgggggggtcagccccccgcccggccagccgccccgtccgggagggaggtgggggggtcagccccccgcccggccagacgccccgtccgggaggtgaggggcgcctctgcccggccgcccctactaggaagtgaggagcccctctcccagccaccacctcgtctgggaggtgtacccaacagctcattgagaacgggccgggatgacaatggcggttttgtggaatagaaaggggggaaaggtggggaaaagattgagaaatcggatggttgccgggtctgtgtagaaagaagtagacatgggagacttttcattttgttctgtactaagataaattcttctgccttgggatcctgttgatcggtgaccttacccccaaccctgtgctctctgaaacatgtgctgtgtccactcagggttaaatggattaagggcggtgcaagatgtgctttgttaaacagatgcttgaaggcagcatgctcgttaagagtcatcaccactccttaatctcaagtacccagggacacaaacactgcggaaggccgcagggtcctctgcctaggaaaaccagagacctttgttcacttgtttatctgccaaccttccctccactattgtcctatgaccctgccaaatccccctctgcgagaaacacccaagaatgatcaataaaaaaaaattaaaaaaaaaaaaaaaaaaaaaaagaataaaaaaaattagttgggcatggtggcaggcgtctgtaatcgcagctactcaggaagctgaggcaggagaattgcttgaacttgggaggcagaggttgcagtgagctgagatcgtgccactgcactccagcctgggcaacagagggagactccgttaaaaaaaaaaaaacaaaaacgaagaagtcaaggcaaaagtagagagtttatttatttgagccaagcttgagggttgcaaatcagaagtatagattcaaattgccctgaatatgcactctgatttagcagtacttgcaagttggatttattttattttattttattttattttttggtctgagacagggtctcaccgtgtcacccaggctggagggtagcaacaagatcatagctcaccacagtcttgaactcctgggattaaatgatcctcttgcctcagcctaccagtggattttttttcttttttgagacggagtctcactctcttgcctgggctggagtgcaatggcgcgatctcagctgatgcacctctgcctcccagtttcaagcaatcctcctgcctcagcctcccaagtagctgggattgcagacgtgcaccaccatccctggctagtttttgaatttttattttaatctttttttttttttttagtttttcttagtttttgtatttttagtagaggcgtggtttctccatgtctgccaggctggtctcgaacttctgacctcaggtgatctgcccaccatggcctcccacagtgctgggattacaggcatgagccactgtgcccagcgaacaagtggatttttaaaggtaaaaaaagggggacagggagtgggactgacacaagtggatcgcttgagcccaagagtttaagaccagactgggcaacatggcgaaacctcatctctacaaaaaaaagtacaaaaattaggcaggcatggtggtgcatgcctgtgattccacctactcaggaggctgaggtgggagaatcacctgggcctgggaggtcgaggctgcagtgagccatgaacctgccactgcactccagtctgggctatggggtgagaccctgtctcaaaaaaactcaataaccacccccgctaaaaaaaaaaaaaaaaaaaaatgcttgtcaggaattcttattggtttacaaaaataacataactctcaggagtttgagaccagcctggccaataaggtgcgcgccaccacgcccagctaatttttgtatgtttagtggagatgggttttctccatgttggccaggcaggtctcaaactcctgacctcaggtgatctgcccgccccggcctcccaaagtgctgggattacaggcatgagccactgcacccaccccttgacttctttcttttaggtccacagtacatagaacatgtcaggaaaagaaaggatggggtgaggtgatggggtgaggatgtaggataatgggacaggatgagcagtgggatgaggggatggaatgaaggactggataagggataggtgggggtaaatgagagcatgggggaggcagtgctctcctgatggtggggtgcacgagtggatggatgacaggataaatagggaagggaggagggataggatgacgagacggctgtagaagcccagagcagagaacattgctgctttggggtcgatgatgtaatcacctcaactcactgacactattcccagccacggatgatgctcacagaatctggggaagtccaaggcctggaagcaggactcatcttggacttccccttctatctagttccaggtgctgaatgaggcacctctgaagaagagaaaggagagagactaagataaacaagactgagaggaaaaaatcagagtgggcaggcagagtgagcctggtaaagtggaccacagagcagacaggctgtggcttagccttggacagcaggtggggttccagagccatatgcttggaggagccttagcaaactaaatcccccagcagtttcttaaacccatccatcacacagcttgccagaaccctggggttggcagcttccagaatggttaggaaaatccacagtagtggtcaggcgcggtggctcatgcctgtaatcccagcacttagggaagccaaggcaggcggatcactaggtcaggagatcgaaaccatactggttaacacggtgaaaccccgtctctactaaaaatacaaaaaattagctgggcatggtggcatgcgcctgtaatcccagctactcgggaggctggggcaggagaatcacttgaacccgggaggcagatattgcagtgagccgagatcgcgccattgcactccacctgggcaacagagcgagactccgtctcaaaaaaaaaaaaagaaagaaagaaaaagaaaatccacagtagggggccagacacaaaaatgatcactccagcactgtccagcccagatcagagggtttctgatgggaagtagctggggtcagggcaaggagtggtggaaaaagtcaggctgttttcagctgaactatacaaatgggcatctcctggcccagggtggggatttggcattgcagaaaggccagaatccacctggaatcactcagttactgtgaaatctatcttgggaacctaagaatgtttgctttctagacttgagaattttggacacttgattgctttctggatgaattttagagatttataaattgtattgaaagtgtttattcgacaagatgtttattgagcatccacagtgtgttaggcactggggatacagcaacacacaaaacagacagagaatcggcccttatggagagaccatttcagtgggaaaagggagtataaaaaagcaaatcaaggtcgggagcagtggctcccaccagtaatcccagaactttgggaggccgaggcaggtggatcgcttgagccctgggcaacatagctaaaccctgtctctacaaaaaattagccaggcatggagcgcgtacctgtagtcccagctactcaggaggtcgaggcaggaggatcgctgacatctgtgaggcagaggcttcagtgagcagagatcacactactgcactccagcttaggcaacagagcaaaactctgtctttaaaaaaaaaaaaaagtaggccgggcagggccgggcccagtggctcatgcctgtaataccagaactttgggaggccaaggtgggtggatcacttgagtgaggtcagaagttcaagaccagcctggccaacatggtgaaaccctgtctctactaaaaatacaaaaattagctaggcatggtgtcacatgcctgtagtcccagctactcaggaagctgaggcaggagtatcacttgaatccaggaggcagaggttgcagtgaacggagatcacaccactgcactccagcctgggcaacaagtgtgagactccatctcaaaaaagaaagtgaatcaatatataaaatataaaaagacaaaaaataatacacgttggcaatgatgtggaggaaaggaaacataccctgttggtgagaatgtaaattagtccagccactatgagaaacagtatggaaatttctcaaaaaactatcataagggctgggtgcggtggctcacgcctgtaatcccagcactttgggaggccgaggtgggtggatcacaaggtcaggagatccagaccatcctggctaacacggtgaaaccccgtctctactaaaaatacaaaaaaaaaaaaaaattagctggccatggcggcgggcacctgtagtcccagctactcagaaggctgaggcaggagaatggcgtgaacccaggaggcgaagcttgcagtgagccgagatggcaccactgcactccagcatgggcgacagagcaagactccatctcaaaaaacaaacaaaaaacaatcatatgatccagcaatcccactactgggaatttatggaaaggaaaagaaatcagtgtatcaaagggatagctacacagcaatgtttattacagcactattcacaatagcaaagatatggaatcaacctaaatgtccatcaacagatgaatggataaagaatatgtggtacatctacacaatggaaaactatttggccgttagaaaaagaataaaatcctgtcatttgcagcaacatgtgaaactgtctgtccctacagggttgacaagaactgcaagccaggttctagatagaaatataattaagcattggctgggcacagtggctcacacctgtaatcccagcactttgcgaggccgaggtgggcagatcacttgagggcaggtgttcgagaccagcctggccaacatggtgaaaccctgtctctactaaaaatacaaaaagtagctgggtgtgatggcaggtgcctgtaatctcagctacttgggaggcctaggcagaattgcttgaacccgggaggcagaggttgcagtgagccgagatcatgccattgcactcccagcttgggtgacagagtgagactcaaaaaaaaaaaaaaaaaagaaaaagaaagaaagaaagaaaattaagcattaatcatgctgcactttggtccacttccttgttgctgaaagccacatagctctagatgctgaccatttgtatccccattgttcttatagacagcatcgctgaccttagaatcatgatgtttttgttaaggatcacgtcagatgttttttggacccccaattccagccaccagtttgaagacccctacagaggatggggattgtcaggcctctgagcccaagctaagccatcacatcccctgtgacctgcacgtatacatctagatggcctgaagtaactgaagaatcacaaaagaagtgaaaatggcctgttcctgccttaactgatgacattaccttgtgaaattccttctcctggctcatcctggctcaaaagctccccggctgaacaccttgtgacccccacccctgccagccagagaacaaccccctttgactgtaattttccactacctacccaaatcctataaaacggccccacccctatctcccttcactgactctttttggactcagcccgcctgcacccaggtgaaataaacagccttgttgctcacacaaagcctgtttggtggtctcttcacacggacgcgagtgaaagggatcagcatgagactataacttcttcttccaccctctgtcccgtgacttcactctgcactcttcaaccaatcaacgatctccacccttcagcccactccaaaacccttgaacaccctagccccaaactcttaggggagatggatgtgaggtttccccccatctcctcattcagtgaccctacaattaaacctgcttctctgctgcaaaccagttataactgtagtaggctcattgcccagtgcacacagcaaatcaacaggagacactgggttgcaggagagaagaggtttcatcgtagggtcgccaaaagagatgaggagttgaagaatgtagggtgaagtcacgggacagggagatgaagaagccacattctcatgctgatcccattccccagtgggtagccttcacactggttgctggaattcaaggtctgaaaagcatctttttacatttttgtttatgtatttattattattattattattattattattattattattattattgagatggagtctcactctgtctcccaggttggagtatagtggtacaatctcggctcactgcaacctctgcctcctgggttcaagcaattctcctgtctcagcctcctgagtagctgggattacaggtgtgaaccacctccccccaccacctccactccgctaatgtcctttgtatttttagtagagatagggtttcaccatgttgactgggttgatcttgaagtcctgacctcaagtgacctacccacctcagcctcccaaagtgttgggattatgggtgtgagccaccgtgcctggccctgaaaagcatcttaagtgattctttctttaacaaaagccttatgactctaatatcagagattctgtctataggaacaatgggggtgcacatggtcagtatctagctctacctgagttttagcaacaaggaaatggaccaaagtgcagcccgaataacacttaattataagtatgtttctgtccagaacccagcatgcaattcttgtcagccctgtgggaatggtttcacagtgtctcgatatactgacttgctgtgtgcattgggcaacaaacctattacaattacacatggatgtaactggaggtcattacattaattgaaataagccaggcacagaaagataaacaatgcatgttcttactcccaagtggaagctaaaaaagttgatcacatggaggtagagaatggaatgatggatactagagactgggaaaggcgtatgggtggggtggggtggggagagaggttggttaatacacctagacagaaggaataagttccctttttttttgagacggagtctcactctgttgcccaggctggaaggcagtggcacaatctcagctcactgcaacctctgcctcttgggttcaagcaatcctcctgcctcagcctccagagtagctgcgattacaggcacgtgccaccataaccggctaatttttttttttttttcagacggagtctcactctgtcacccaggctggagtgcagtggcacaatctcagctcactgcaagctccacctcccaggttcacgccattctcctgcctcagcctgccgagtagctgggactatagacgcctgacaccacgcccggctaattttttgtatttttagtagagatggggtttcaccgcgttagccaggatggtcttgatctcctgacctcgtgatctgcccgtctcggcctcccaaagtgctgggattacaggcgtgagccaccacgcccggcaagaacttttaagttttcttatctataggatgttgcaatcatcatctttaaacattagacatggaatctttataataatcttgccatatatatatatatatatatattttttttttttttttttttttttttttgacactgagtctcactttatcgcccaggctggagtacagtggcacaatcttggctcactacaacctccacctcctgggttcaagtgattctcctgcctcagccaccccagtggctggggactacaggcgtgcaccaccacatccagttaattttttttttttttttgagacggagtctcgttctgtcgcccaggctagagttcagtggggagatctcagctcactgaaacctccgccttgtgggttcaagcaagcaattctctgccacagcctcccgactagctgggattagaagtgcccaccaccacgtctggctaatttttgtatttttagtagagacggggtttcatcatcttggccagactggtcttgaactcctgaccccgtgatccacccacctcggtctcccaaagtactgggattacaggcgtgagccactgcgcctggccggttaatttttatattttcagtagagacaggatttcaccacgctggctaggctggtctcaaactcctgacctcaggtgatccacccgccttggccactgtgcctggtcaacagtctttctatttttattctaggctggagacctttgtctcaaaaacaaaacgagaatgctccctggagtctgtactgatccctcttccctcccaccgtagattagttttctccttgcatttaaaaagacctttctggctggcatccagtgaatgaattgtggaggagggggagaaggagagaggaagcaggtagctcagtggggaagctactgcaaaatcctggcaagcaatgacagtaccttgaatcagggctggtgtcagttggatcagggtggtagggaaaggaggaaatggataaatttggaatgtatttggaggtagagccagcaggatttgctgacaaactgggtttaaagtcaaagagagaaatcaaggttaaacctgacaaataaaaacagatgtggtctcaggcgagtagagacattatgcagaaagactattgcatcagggggaaagatggctgtaaaaacaatgaacaagaccagaatctgataacccagaaggatgtgttgtctaatgaaactaattttttcccctcctcctattttttttttgagacggagtttcactcttgttgcccaagctggagtgcaatggcgcgatctcggctcactgcaacctccgcctcccggattcaagcgattctcctgcctcagcctccctgagtagctgggattacaggcatgcaccaccacacctggctaattttgtatttttagtagagacggggtttcaccatgttggccaggctggtctcaaactcctgacctcaggtgatctgcccacctcagcctcccaaagtactgggattgcaggcatgagacaccgcgcccggcctctcctatattttgttgtcatcagcaagtgaaaagatggtgataccttttacagaggtaaggaaggaggtgagagaaagtattcccagatggggtgggaagctggtacagcccactttgcaggaggtgggggaatcgggaattcttttatatccatgaagtttgagatgtctgttagctctcccaggggtagaacagagggagcagataggctcaaggttggatttggaacgtcctagaaaccttccagaacaaggcaaaggaggaactgagaactggcatttacttcatagcaagagcgtatgagcctccccacccctcctcctttggcttcagggcacccctggaatgttagaggctagaatcaatgctaaagaagaccacagtcaaggattccccagactccagggagcactctggctatgctcttgagagaaagggctctggactagaatacaaattgcaagattgcaggccgggggcagtggctcatgcctgtaatcccagcactgtgggaggccgaggtgggtaaattgcctgaggtcaggaggtcgagaccagcctggccaacatggtgaaaccccaactctactaaaaatacaaaagttagctgggagtggtggtgggcgcttgtaatcccagctactcaggaggctgaggcaggagaatcacatgaacccaggaggcagagattgcagtgagccaagatcgtgccactgcactccagcctgggcaacagagcgagaccctgtctcaaaaaaagattgtgaaaattctaagaatctaatttttttttttttttttttttttttgagacggagtctcgctctgtcgcccaggctggagtgcagtggcgggatctcggctcactgcaagctccgcctcccgggttcacgccattctcctgcctcagcctcccaagtagctgggactacaggcgcccgccactacgcccggctaattttttgtatttttagtagagacggggtttcaccattttagccaggatggtctcgatctcctgacctcgtgatccgcccgcctcagcctcccaaagaatctaatattttaaaactccagcatatgcaactcaaagctcatctaattatacacttaagagttatgtatttcattgtatataagataccttgaggaacaaaaagtatctgtaaacaaatactgagctctagctactgatatgcatgctgatgtatttgggagtgaagtgtactggtatctgcaactgactttgaaatgcttaaaaaaaaatcaatggataggcaaaatgaacagatatgtaatgaaaaaagggccaggcacagtggctcatgcctgtaatcccagcactttgggaggctgaggtgagaagatcacctgaggtcaggagtttgagaccagcctggtcaacatggcaaaaaccccgtctctactaaaaatacaaaaaatagccaggcatggtggtgcacgcctgtaatcgcagctacttgagaggctgaagcaggagaattgcttgaacccgggaggcagaggttgcaatgagccaagactgtatgctattgcactccactctgggcaacagagtgagactctatctcaaacaaaaaaagaatagataggtaacaaagaaaggataataaaatggtggaatctgatgggtatacaggtgttcactgtatgtttgaaattttaatatttttataataaaatacgaaatcaaaatgcaaagcaaacaaagtaactgccctgctgaaaacccctccagacagcttccgtttgcaatagaaataaaatgcagtcttttccaagaccttgcaagatggcccctgcagacttcatgaatcttatctcctacattcaatctttgaaaatataacaaatatttattgagtgcctactgtgtgtcaggcactgcactatatgttggggatacagcagtgaaccaaacctacaataattcatgcacaaatggttctaacattcttccttctcaagaagcccattcccctggcaggccttctcacttcctgaaattgttttcatctcatcttcatctgcatgtggatatgagctcaggaaggccagagcccttctctccatcgctcatagctgcaccctcgggtctagaacaaggtcttgtttatagtaagacctcaataacagttagttgcagaaatattagctaacatctatttagtgcttgttacatgtgcacctgcgtctgctttaaatggtgtgcacagatgtactatttaatcctgaaaactagccccattttacaaggctaacagaggcacagaggaattaggctgtgaattcaagcagtctggcttcagccatcacggtcctaaccgctctgcaaactgcctctaaacgaatgaatgaatgactcaatcattctaactggcccaagtcaaaatattaactctgccactcagccaagttgacctggggccaaccgatttatctccctggacttcagattgtttatccttaaaggtcaagtccttcctctcagttcgtgaagatgtaagatgctggagaaaattgactcaaagacaccccatacacgcacgcacacaggaacccacatccgaacaatgagcgaggtaggagctggggagagtggcgcggggtcaccgccagatgcggggtgtggcaacctccaggcggccaaagtctctgacttccaggttcttctgtttgcttactccctatccgggggcccaaggcgctgtctccgccgcccaagccccgcgtaaacctgggtgacctcggagacatccgttggagcatgagttcccgacatcaggcggcggcggtggtccgggagaaacccggcggcggggagataagcctgcccaggaggcagggggctgggctagctgccccgccccgcgcctgacttcgttggggagggagacgcccggctcccgcccctaactagcccagccgcgcggagcgcctgggagaggagaaggagccgacctgccgagatggaggcgaccggcacctgggcgctgctgctggcgctggcgctgctcctgctgctgacgctggcgctgtccgggaccagggcccgaggccacctgccccccgggcccacgccgctaccactgctgggaaacctcctgcagctacggcccggggcgctgtattcagggctcatgcgggtaaggggctctggggacgtcctggctaggggtgggaggattcctgggagagaaacccgagtgccagggtgaggggcttttcgggtatcctagggaggaggcaggggcaggggtcccaaggcaaaggggctgctgctgtcctggggttgggggcaggagcaggttgtccagggctgagaaggggagaggtgcccgggagagaggatcgtggggtgggggaccagggctaggaggggcagagacctctgcctacagaatcctgggaaggtgatgggcagggaccgaggctgaaagagacaggagtcctccagccgaggagaagctgatgcagctgggcttgtcccagagggagaggtagctggagccatacaggtggggcatgctgaagagggcacaaagaagaaaagggggaggcgtccctgcggggagttggaggcagagaagaggctggagggttgcaggctcagagagggggtcccgctgaaggaatctgccagcagagaatgcaggatgggaggatgggtggagctcagttgggagttcctgggactggggaggaaggagagcaagaaagaaggcagaggcagccccagccttaggggatagcaggtgggagtgggcagaggcctgaagtttcccattcaaaaggattctgggtgacttcaaggacgtagaaaaaagggtggggtcttgggggagagatggggcggatactcagcagtgtctgctccagaatttcagggttttgtggtgactgaaaggggtggctggatatttggggggcagggagggccctaaggaattaagggagacccaaactgcttctggattgcccagcgtcagaggttagggttcagcaggaagcaagggaacgacaggaagttgggggatgccactgaaggatgtactgggggaggaggcccgggagcctagtgcaaaaagagaactgagcctcagctatttctgctgggatgggggcaggttcctggtagagggcgtagaagctagacccggtggctcctcaagtgacaggggccatgatggagacaccttggatcgaagaggtcacagcaccctcctctttcttcctccctacccccagctgagtaagaagtacggaccggtgttcaccatctacctgggaccctggcggcctgtggtggtcctggttgggcaggaggctgtgcgggaggccctgggaggtcaggctgaggagttcagcggccggggaaccgtagcgatgctggaagggacttttgatggccatggtaagtcaagggctgctaggccctccgctcacagcctgccaccacttactggtgtgtgacctttgcacatggcttagtccctctgttgcctcatctgtcaaatggagtgataacagtgcccatcagccgggtgcagtggctagtgcctgaaatcccaacactttgggaggcggaggtgggtggatcacttgaggtcaggagttcgagaccagcctggccaacatggtgaaaccctgtctctactaaaaatataaaaattagctgggcatggtggtgcgtacctgtaatcccagatacttgggaggttgaggcaggagaatcgcttgaacccgggaggcagatgttgcagtgaaccaagactgtgccactgcactccagtctgggcaacagagtgagcctccatctcaaacaaacaaacaaaaagcagtgcccatcatgtaggattgagtgattgagtgaggactgagccttgtgcaaagtgagcactcactaatcaccaggttgtagtatcagtgataaccatcaatgatccaggtaaagccctgagggttcagaaagatgccggagcgctttcaaggtgctggggattggtgggcaagccctcgaataatagaaacagttctctgtattacaacagaaagcaggaggcccatgctgggtgctgccaggaactcagtagtaactaagacagcaccggtgctgcttccccagcgcacctaggccagtggggaaacagactcaccacacagtcccagcccagagtggtcagggccaagatggggaagcacggggagaaaggtcagggtgggatggggaggggtcagggcaagaggggtcagggccaggctgagggaagccctgggactgtaggaatttagaggaggtacctgacccggcatgtttggtgagggagcttcaggaagtcttcctggaagagaggctgtcggagctgagactcataagatgagtggggagggtgttccaggcagaaagaccagcacctacaaaagcatgactttgagagaagcattcatccattcaactgatgaattttcagactgggcacgctggctcatgcctgtaatcccagcactttggaaggctgaatggggaggatgacttgagcctaggcatttgtgacaagcctgggcaacatggtgagaccctgcctccacaaaacaaacaaacaaacaaaaaatcattatacctggtaccatgggtaccaggtacatagaaatgactcaggcagatatggtgtcctctcctactgtgggagaggcgggcttatactgcagtaagacaatagagggagggaatataatcctaaaatgagaggtacagatttgagagcaaacacagggcacaggcatatgtacgagggtaaagagggaatcagggaaggcttctcagagaaggtgacatttaagccgggacatgaaggatgaacgagttagttcaccaaggatgggatggaaaggggtgagagtgatggaggcagagggaactgcaggatcataggcctagacaggggatcctgacgcccttgaggaagtgagagaagaccagcgcagtcgtagtgggttaagtaacaaagctgagaagccagggaaatccctggtcatgcagggcctgtgagtcacgtcagagtgtttgggcttttgtttttcctgggagcagtcgattttaagcagggaacagctgtattcagagttgggaagatcctgtggttgctgcctgaaggggatgaaactggaggctaggagcccagggtgatagggaggatccagggtgatggggaggctgggaggtccgcggtgatggaccagggctggggccaggggatggggaggaaggagtaattgggagaggcctggggctctggccgaggaatggatggtgggctgaaacagggagaggagagatgcttaggccactttggaacacagtagggcaaggacaggagacacccaaggggaagtgcccaagagaccacgacaggctggcattggacagggaaggtctgtctggagcaggtgtcttggataagggaggaaaatggtgcagttccatcctcctccctctctgttcaacctctaaactacatggggcacaggacccagtgggactccataaatgatgggatgggtggatggaaggaaggaaggaggaaacaactcttcattcatcctggttatttacagaacaggccaggtgcggtgctcacgcttgccattctagcactttgggaggctgaggtgggtggattacctcaggtcaggagttcaagaccagcctagacaacgtagagaaaccccatctctactgaagatataaaattagctgggcgtagtggcatatgcctgtaatcccagctagtcgggaagctgaggcaggagaatcgcttgaacccgagaggcagaggttgcggtgagctgagatcgtgccattgcactccagcctgggtgacaaagcaagacctcgtctcaataataataataattacaaaacagaaggagcctgggtcatcccagctacctacttttcaggagaatgtactcccttacccaagggcaaaggatgggagaaccagtttgattatgcatttattgagcacctactgagtcctcatccctgggctaggctggaatggactcagatggagcctgaagagtccccctcagggaacctcactagaaagaaggaggaatcggccgggcgcggtggctcacgcctgtaatcccaacactttgggaggctgaggtgggtggatcacaaggtcaggagatcgagaccatcctggctaacacagtgaaaccccatctctactaaaaatacaaaaaatgagccaggcatggtggcgggcgcctgtagtcccagctactcaggaggctgaggcaggagaattgcttgaacccgggaggcagaggttgcagtgagacgagatcacgccactgcactccagcctgggcaacagagcgagattccgtctcaaaaaaaaaaagaaagaaaggaagaagggggaatgggggagaggggccggtccctttttgagtctagccttctgcgcaggggttttcttctccaacggggagcggtggaggcagctgaggaagtttaccatgcttgctctgcgggacctgggcatggggaagcgagaaggcgaggagctgatccaggcggaggcccggtgtctggtggagacattccaggggacagaaggtcagcatggcggggtcaccccagggtctccagccgagtgaaagggaaaactctcctactgtggctgggggtggccccaacccaggtcctggaatgggcaggaggggaagccttgaactctagggctggcctgggggttctgttcactgccaccttctgtctctgtcccactgtctctccgaggctgtcatgacatctctctgtgtgtctctggtgctatcatcccattcttcctgggtctccatctctctctctgtctcttttctttctctctcctttcctctattttttgggccctcagtctatctctgtttctgtctccctgtctgtgtgatggtcactctgtttctttctccctgtctgtttctctgtccctatctgtctgtatccttctttgcctgtttagctctctccctgcgctgtccatccatctttccctgcctccctgtctctctctggttgggttcagctccaacctgctcccctctgcctggctccatcacagcctacctccctgcccccattccccccaggacgcccattcgatccctccctgctgctggcccaggccacctccaacgtagtctgctccctcctctttggcctccgcttctcctatgaggataaggagttccaggccgtggtccgggcagctggtggtaccctgctgggagtcagctcccaggggggtcaggtgagtgggtgggacccctctccaactaccttccctgaaggttcctgccaaggtcccatgagaactagctgcccttctccccacagacctacgagatgttctcctggttcctgcggcccctgccaggcccccacaagcagctcctccaccacgtcagcaccttggctgccttcacagtccggcaggtgcagcagcaccaggggaacctggatgcttcgggccccgcacgtgaccttgtcgatgccttcctgctgaagatggcacaggtgtgggaagggtgcagggaccccctctctgaatgggcgtggtgacctggcaggtccccagccaggtgtccctggggacctcaattgggttcctctctctttctctctctgcatgtctctgtgagtatgagtgtctctgtgcatgtgtgtgcatcccttctctgcacatctgtctgtccctttcagggcgttgctctcactgcctctcccgcccccgacctgggcatttgtgccgggctgtctgtctctccagcatctctcctctttctccctcccacctcggcccttgtgttcaggccccatgcccagggtcctacaccagcaatccccaggatcacttcatcccatcccctgcagcctccccagacttttatgtaaattcacaattttatgtgaattatggtcatttattaggaagccttgcaatatcaagttatgttaataaagtccactttattaattatataagaacaatatttcttttccttttttttttcttttctttttaaagagacaggatctctttctgttgcccaggctagagtacagttgcaaaatcatagctcactgcaaccttgaactcctgggctcaagcaatcctcctgcctcgggctcctgagtagctgggacaacaggtgtgcaccaccacacctggctaaattttttttttttctttgtagagatagactctcactatgttacccaggctggtcttgaattcctgggctcatgtaatcctcctgctgccttgaactcccaaagtgctgggactataggcataagacatcatgcccggtcgggcacagtggctcatgcctgtaatctcaggactttgggaggccgagacgggcggatcacctgaggtcgggagttcgagaccagcctgaccaacatggagaaaccccatctctactaaaaaaaaaaatacaaaattagccggacgtggtggcacatgcctgtaatcccagctactagggaggctgaggcaggagaatcgcttgaacccgggaggcttaggttgcggtgagctgagattgcaccattgcactccagcctgggcaacaagagcgaaattccatctcaaaaaaaaaaaaaaagaaaaaaagaaaaaagacaccatgccctataagtaaactagaattaaggtgactcctaaggaaataaatagtttttaactgtacgaacttttggaagaatggggccaattctttaattaaatgcagcctccctgtttgtggagaaagaaaaatttttcttaaccctattgccccatttcttttctcttttattgaatattttttagttttaactatagtaaaatacacataacgtttaccatcttaaccatttttaggtatacagtacagtagtgttcagtacattcatactgttatgcaatcagtctccagaactcttcatgttgcaaagctgaaactctatacccattaaacaactgcctgttcctccctcctccaacccctggcaatcacctttttttttttgagatgaagtctcactctgtcacccaggctagagtgcggtggctcgatctcggctcactgcaagctccgcctcccgggttcatgccattctcctgcctcagtctcccaagcagctgggactacaggtgcccgtcaccacgcctggctaattttttgtatttttagtagagatggagtttcatcgtgttagccaggctgatctcaaactcctggcctcaagtgatccacccgcctcggcctcccaaagtgctgggactacaggcgtgagccactgtgcctggccaggaagtagactcttgatattagttctctctggttgaaatgtttttaaaaatgaaagagaatgactaataacaaaaacacagaaagttataaggattgatgaagatgtggagactttgaaacccatgtataccattggtgggaatgtgaaacgacgcagccctgtggaaaatggtacagcagttacctgaggtcaggagtttgaaaccaacctggccaacatgcagaaaccccgtctccattaaatgtacaaaaattagccaggcatggtggtgcgcacctgtaatcccagctactcgggaggctgaggcaggagaattgcttgaacccaggaggcggaggttgcagtgagccgagatcgtgccactgcactcagcctgggcaacaaagcaagactctgtctcaaaaaaaaaaagtctacttcccaaccttcccaaaaatttatctaaaccccgtgacaaaactttaacttgtgtttccgaccccaggcttggctgttctggacatttacttcccaaaggctgtgttctctcagcccctctgcctggtttctttcaggaggaacaaaacccaggcacagaattcaccaacaagaacatgctgatgacagtcatttatttgctgtttgctgggacgatgacggtcagcaccacggtcggctataccctcctgctcctgatgaaataccctcatgtccaaagtaagagccttttccacttgccaggccttgggaacagaagtcagggttctaggctgagcaaggtggctcacgcctataatcccagcactttgggaggctgaggcgggctgatcacttgagaataggagtttaagaccagcctggccaacacagtgaaaccccatctctactgaaaatacaaaaattagcgggtgtggtggcatgcacttgtaatcccagcactcaggtggctgaggagtgagaattgtttgagcccaggaggtagaagttgcagtgagctgacatcacaccactgcactccagcctgggcgacagagcgagacactgtttcaaaaaaaaaaaagtgagaattctagagggaagagtgggtgggccaagcagacaggctgagttagatctttgaggcatcgatgggcatggcgtttgagatgtcgaggagccagaagaggttcaggagttgctgattgcagtatgaggcacagtgaaaaacaaggcaggtgtctgtgggcctcatcgccttagtgatacattaggtgccttatcctgagccatggggagcaatgcaatgactttgagcaggggagggcaaggtcaaattggttttttatttttattttttttactttttgtgggggatagactctcactctgttgcccaggctggagtgcagtagtgcgatctcggcccactgcaacctccggcctcctgggttcaagcaattctcctgcctcagcctcccaagtagctaggattacaagcatgcaccaccacgcccagctaacttttgtatgtttagtagagacagggtttccccatgttggccaggctggtcccgaactcctgacctcaagtgatctgcccacctcagccttgcaaagtgctgggattacaggcatgagccaaggcacccagcccaactctagcattttcgggtcaggcagctgctgtgggccatggggacgggctgacctggaatatgggagtggaggtcctggtagtgttgcaggagtggaattagctgtgacttccagcagtgacttgggttctctgagtctgtttcctcacctaggaaatggggatggataacaatatgtacctcacaagggtgctatgggaattaagaaagtatggatgagccaggcatggtggcttatacctgtaatcccagcactttgggaggctgaggtgggaggatcacttgaggctaggagttcaagatcagcctgggcagcataatgaggccctgtctctaccgaaaatagaaaaattagctgggtgtggtggtgcgtgcctgtggtcatagctactcaggagactgaggtggaaggatcacctgagcccaggaggtgagatgaaggctattacagtgagccgtcattgtactactgcaccagcctgggcaacagagtaagaccctgtctcaaaaaaaaaagagagagagagaaggccaggtacggtggctcacatctgtaatcccagcactttgggaggccaaggcaggtggatcacctgaggtcaggagttcgagaccagcctcgctaacatggtgaaaccctgtctctattgaaaatacaaaaatgagctgggcatgatggcaggcgtctgtagtcccagctactcgggaggctgaggtgggagaatctcctgaacccgggaggcggagttgcagcaagccaggatcgcgccactgcactccagcctgggtggcagagcgtgtaatcccagctactcaggaggctgaggcgggagaatcgcttgaatccgggaggcagaggttgtggtgagccaagatcgcaccattgcactccagcctgggcaacaagagcaaaactccgttgcaaaaaaaaataataataataaaatgaaataaaataaaataaaataagagagagagaagatagatggaacacccaacacacaagatgtgtggtctttgggctcagtgagggctgggggaccactcctccccacctgtcagcctcaccccaaactacagctatgcaagcagatgggcttctgagaggaggatccctgggccctacccccgtctgactcctgccctcctcttgcttgcagagtgggtacgtgaggagctgaatcgggagctgggggctggccaggcaccaagcctaggggaccgtacccgcctcccttacaccgacgcggttctgcatgaggcgcagcggctgctggcgctggtgcccatgggaataccccgcaccctcatgcggaccacccgcttccgagggtacaccctgccccaggtgggtatgcgtatggctgccacccatggttctctgcctcggggcctgagcccgggtggtttgctgtcagtgtctccctgactttttcttgatcttagtgtctctctctctctctctctgtctttatctccctctctttctctgtctctgtcttcctcctccactcctacccccctgcatctttcttctccttctttctctgacaccccctccctttctgcatatattttttttctttttttgagacagagtctcgcactgtcgcccgggctggagtgcaatggcgtgatctcagctcactgcaacctccgcctcccaggttcaagtgattctcctgcctcagcctcctgagtagctgggattacaggtgcccaccaccacgcccagctaattttttgtatttttagtagacacggggtttcattatgttggtcaggctggtcttgaactcctgacctcgtgatctgcccgcttcggcctcccaaagtgctgggattacaggcgtgagccaccgcacccagccatgctttctgcatcttttaactctttctgtttctttttggtttgtgttttcttcccctttgactctatctctgggccccatctgccccacagatctcccaattctacctccttccaaggtggttgggacaatcgaatgaggtaacatacagagaagcagtttgaaaactgaggagcaagtccaggactaagggaagccctcttgacccttagcccctgctgcagacacattctctcctctgtctctctctctcaatctcagtgcccttcactggagagcagctccgatgcagaaccaaaagggggcgatgtttccccagaaaccccagcagtttatgcaagcagctccctcctccaccttcactgcagaatcaaacctatggcagttaggatccagtgctgctatgctgctattttctttttcttcttcttctttttttttttttttttttttccgagatggagtctcgctctgttgcccaggctggagtgcactggcgtgatctcggctcactgcaacctccgcctcccaggttcaagcaattctcttgcctcagcctcctgggtagctgggattacaggtgtatgccaccacacccggctaatttttgtctttttagtagagatgggttttcaccatgttggtcaggctggtctcaaactcctgacctcatgaactgcctgcctcggcctcctaaagtgctgggattacaggcgtgagccactgcacctggcctaccccctcctgttttgtagatggggccttgggcaaatcacttccccccctgaacctcaatatatccctcctctacattagaaacaataatagtatcaacttgaagctgtaagataatgcttgtaaaacaaacaccaactcaactcttgggaaccggtcctgtgtaccaggcagcaacaatttaatgatgataatgacaggtatccaggcttgaggacctgctctgcaccaggggttattctgagtgctttgcatatctattatctcatttaatctttaaagcaaccctataccattatcatgcccatcttacagataaggaaactgagagcttgaaaagtttttagaggatttgccaaggtcccccagcctgcaaatagtagattcaagatttgaactcagagactatgccttaactactattctttgcctttctttctttctttttttctttctttctttctttctttctttctttctttctttctctctctctctttctttctctctttctttctttctttctctctctctctctttctttcttttctttttctttctctctctctctctttcttcctttcttccttcctcccttcctcccttcctcccttcctgtcttcctctctttctctctttctttcttgacagggtctctctttgtctcccaggctggggtgcagtggtacaagcatagctcacagcagccttgaactcctaggctcaagtgatcctcccacgtcagcctcctgagcagctgggacaacgggctcataccaccatgcctggctaattttttaatttttcctagagacaaggtcttgttatattgcccaggctggtctcaaactcctgggctcaaatgcttctctcacctcagcctcccacgtggctgggattacaggcatgagccactgcacgccactcaacactccacaaatgttgatgccattaggttttgtgaactagtgtccctggcacccgagacttgtactccacactcgaggaccaaatggactggggtgggaaggggtttatagtttcattattatttcccctcagggcacggaggtcttccccctccttggctccatcctgcatgaccccaacatcttcaagcacccagaagagttcaacccagaccgtttcctggatgcagatggacggttcaggaagcatgaggcgttcctgcccttctccttaggtatctgctgcagccctgggtatcacaagcaggtgctggcgaactccaggcatctgtgccagctgggggcacccttctgcaccctgggcttactgttggctcctccacctgctgttccccccgtgggcctgggtgtgaggaatactgactcagccctctctctctctctctcctcaccagggaagcgtgtctgccttggagagggcctggcaaaagcggagctcttcctcttcttcaccaccatcctacaagccttctccctggagagcccgtgcccgccggacaccctgagcctcaagcccaccgtcagtggccttttcaacattcccccagccttccagctgcaagtccgtcccactgaccttcactccaccacgcagaccagatgaaggaaggcaacttggaagtggtgggtgcccaggacggtgcctccagcctcaacagtgggcatggacagggttaatgtctccagagtgtacactgcaggcagccacatttacacgcctgcagttgttttccggagtctgtcccacggcccacacgctcacttgactcatgctgctaagatgcacaaccgcacacccatacacaactacaagggccacaaagcaactgctgggttagctttccacagacataaatatagtccatctgcaatcacaagcacatagccaggtaacccaccaactcccctggatctgcagcccacacgtgggagtctggctgtcaccttcacaagccacagaaacggccacacatgttcacagctcacacgccctctccattcatcgaacttctcagtgtccctgtccctggtgcctggcacagggaacagcatgccccctccggggtcatgccacccagagactgtcgctgtctatggccccaactcatgctccctctcttggctacaccactctcccagcctgtgaccaccgatgtccacacacccccaaccacttgtccacacagctacccacgtacgacatcgtcctggctccccagagtatcttcccactgagacacgccgcccccacagaggcacagtccccagccacctctgcaactgcagccctcagtcacccctttttaagcaccctgattctaccaaatgcaaacacatctgggtctgcgattatgcacagagactttggacatacgaggaccctcagaccggaggaacacctgcccaaccccaacacgtgcttatgtaaccacgtggaaagcggcccctgctgcccctccacacacacatacacactcactgatctacagcccctgttcggcgtcagagtccccactagacccagtggaaggggttagagaccaagtaggggccagtttccaattcaccctgtcagggagtgagccggatctgacgttccttgtgacttaagggtccggcttgggaattaaagtttgtttctggcctttagcctactgcgtgtgtgacccgtgtcagtcactgtgagtaaggggtggggacaggggagtccacccctcccctgaggctgggcgggagctgaaaaacatggccaccgcccaccctggctgttgacatcaggaccagatgtggagctgggaggaggggcagggctggtgacgccctgggcctcatttccaaaaagggccaaggtgtccggcggtgggaagtgggcaaggagggggtaacccaagctggactgtggaccttgggggcttcctcagccagggagagcctgaagccaactagatccagaccctagagactcttcaaacttgagtacaggaactagcttgcaacacagactctaagcccactcccatttcttccaccctttttctcttgcctccccttcacaaggaaaccagaggcatttgtaaatttcctttctttttttttttttttttttttttgagacggagtctcactctgtcacccaggctggagtgcagtggtgtgatcttggctcactgcagcctccgcctccgggttcaagccattctcctgcctcagcctcccaagtagctgggattacaggtgtgtgccaccacgcccagctaatttttgtatttttagtagagatggggtttcaccatgttggccaggctggtctcgaactcctgacctcagatgatctgccagtctcggcctcccaaaatgctgggattacaggcgtgagtcgctactagataaatttcttatctagcaaagaagtttgcaaacatacgcaaaagtagaaagatacaatgagcccccaggtgcccatcacccagcctcatttcaatagtcatcaactttctgcagcttttacttcatctatatccttttctgcctctttttttttttttttattttgagatagggttttgctttgttgcccaagctggggtgcagtagcatgatctcatagttcactgtggcttcagactcctaggctcaagtgatcctcccgcctcggcctccaagcagctgggactacagatgcgtgccaccacacccagctaaatttcttatttttattttctatagagaaagtctcactatacagcctgtgctggtctcaaattccaggcctcaagagtttccatcccagcctcccaaagtgctgggattataggcgtgagtcactgcaccctgccctgatatttttattttatctattgctttttatttacttatttatcttttatttttgagacagagtctcactctgttgcccatgctggagtgcagtggcatcatctcggctcactgtaacctccgcctcttaggttcaagcagttctcctgccttgacctcccgagtagctggaattacaggtgcctgccaccaagcctggctaatttttttatttgtagtagagatggggttttgccatgttgaccaggctggtctcgaactcctgacctcaggtgatctgcccaccttggcctcccaaagtgctgagattactggtatgagccaccgtgcctggccacctattgctttttaaagattatttttttattattattatttttttatttgagatggagtttcgctattgttgcccaggctggagtgcaatggcgtgatctcagctcaccgcaacctccgcctcccaggttcaagcgattctcctgcctcagcatccctagtagctgggattacaggcatgcaccaccatgtccagctaattttgtatttttagtagagacgaggtttctccaggttggtcaggctggtctcaaactcccaacctcaggtgatccgcccatctcggcctcccaaagtgctgggattacaggtgtgagccaccgcgcctggccttaaagattattttaaggcaaattacagaaagcaatttaatgcacatttctgagagttaaagatatttttgcccttgacattttatgaggacagttttcaaacatgcagcaaagttgagggaattgtacaaggaacaccttgtgcacttcctgggttctcccactagcactttgctacactgctttctgacgtttctacacacctgaccaccagctcaggatttatttatttatctatttattttgagacagagttttgctcttgttgcccagactggagtgcaatggtgtgatctcggctcacggcaacctccacctcctgggttcaagtgattcttctgcctcagcctcccaaatagccgggattacaggcatgcgccaccacgcgtggctaatttttgtgtttttagtagagacgggatttctccatattggtcaagctggcctcaaactcccgacctcatgtgatctgcctgcctctgcctcccaaagtgctgggactacaggtgtgagccactgcgcctggccaattttttttttttttagacgaagtctcactctgtcacccaacctggagtgcagtggcatgatcttggctcactgcagcctccacctcccaggttcaagcgattctcctgcctcagcctcctgagtaactgggattaccagcgagcgcctggttaatttttgtttttttagtacagatggggtttcatcgtgttggccaggtgtgagccaccatgcccagaccagttcaggactttttaggcatttccgagtaaacgcacgtatcagttcatcaaaaaacttaagcaatgcatatatcattagcgaaagcttcttttttaaaaaaaaaaatccaagatgttaacactttattggcttaagttctatagagatagcacaaaacagagaataatagagaactgaaagatgagattggaatcagatcctaactttgccacctcctagctggtcacaccttgactgaggctttaccatcttaaagccttaataaattgataagatgtaagaaatgtgggccaggcacagtggctcacacctgtaacccttgttgagggaccgaggtgggaggattgcttgagcccaagggttcaagaccagcctggccaaaagggcaagactctgattcaagggaaaaaaaaaaaatccagaaagaaatgtgaaaactttcagaacttcgtaggaaataaatatctgctaagttcttcttggatttaatattattactattttttatatgtcggtgcactttgaaaaggaatgaagtttaaggttttcttcttttaaaagtaaggcaatggggccaggtgcggtggctcacgcctttaatcccagcactttggggaggctgaggcaggcagatcacttgaggtcaggagttcgagagcagcctggacaacatggtgaaacgcggtctttaccaaagatacaaaaactagccaggcatgatggcaggcacctgtaatcccagctactcaggaggctgagacaggagaattgcttgaacccagcaggcagaggttgcagtgagccaggactgtgccacagcactccagcctgggtgacagagtaagactccatctcaaaaaaataaaaaattaaattaaggcaatgatttgcattcctttgcagtcaaaattcacattcagggaaatctggaatcaggtagaaatacaagcagacctatttatttaaagaggtgggctatagccgggcatggtggcgggcacctgtagtcccagctacttaggaggctgaggcaggagaatggtgtgaacccgggaggcagagcttgcagtgagccgagatcacaccactgcactccagcctaagcgacagagtgagactctgcctcaaaaaaaaaatttttttttttaaataataaaaaaaataataaagaggcgggctgggcacggtggctcacgcctgtaatcccagcactttgggaggctgaggtgggcggatcacgaggtcaggagatcgagaccatcctggttaacatggtgaaaccccgtctctactaaaaatacaaaaaagtagccaggcgtggtggtgggcgcctgtagtcccagctactgaggcaggagagtggtgtgaacccgggaggcagagcttgcagtgagctgagatagtgccactgcactccagcctgggcgacaaggcaagactctgtctcaaaaataaataaataaataaatacataaatacataaataaataaataaagaggcatgtcggcctgggcatggtggcttatacctataatcttagcactttggtaggctgaggtaggagaatcgcttgagcctaggagcttgagaccagcctggacaatatagtgagaccccatctgtacaaaaaagaaaacaaacaaacaaacaaaggcacagactttgcactgtatcaatataaaagttgacatcaggatgatttcagtagcaagtaaaaaaatacagaaactcaaaatggcttaaacaataaagaagaattattggtccccaaagtaaaaatggaatcggtgtggtcttcaaatagttttctgcgtgtgttaaaatatacacataataatattattttaaccatttagaagtatacaatttagtagcattaaatatattcgcaatgggccaggcgtggtggctcacgcctgtaatcccatcactttgggaggccgagacaggcggatcacctgaggtagggagttcgagaccagcctgaccaacatagagaaaccccctctctactaaaaatacaaaattagtcgagcgtgggggtacatgcctgtaatcccagctactcaggaggctcaggcaggagaattgcttgaacccggcaggtggaggttgcagtgagcaacctgcactccagcctgggcaacaagagtgaaactctgtctcaaaaaaaaaacaaaaaaaatattcacaatgttgtataaccatcacaactatttgtgcccaaaatgtttccattgtttccaacaaaaactacccattaaataataactctggctgggcgtggtggctcacacctgtaatctcagcactttgtgagtccaaggcaggcggatctcttaagcccaagagttcaagaccagcctgggcaacatagggaaacgctatctctacaaaaagtgagactggtgtggtggtgcacacttgtagtcccagttactcaggaggctgaggtgggaggatcacctgagcctgggaggacaaggctgcagtgggctttgatcacaccactgcaccccagcctgggtgacagagtgagcccatctcaaacaacaacaacaaaaaacacaataactccccattaaagtttattttttaaaagtcaaaactacaatactcattttcacacctatcacaacgaacaattctgttattcattcattgtattcatagtgattcatagtgttcacattttcacatttctctgatagtctcataaatgtcctttttttttttttttgagatggagtctcgctctgttgcccaggctggagtgtagtggcatgatctcggctcactgcaacctccgcctccggggttcaagtgattctcctgccttagcctcccgagctcccaagtagctgagactaccagtgtgcgccaccacacctggctaatttttgtatttttagtagagatggagtttcaccacgttggtcaggctggcctggaactcctgatctgctaatttgcctgccttggcctcccaacatgctgggattacaggtgtgagccactgcacctggcctgtcctttaaaaaaaaaaaaaaaaaaagataggctggagtgcagtggcacaatctctgctcactgcaacctctgcttcccaggctcaagtgatcctctcgtctcagcctcctgagtagctgcgattataggcacacaccaccacacctggctaatttaaaaaaaaatttttttttttttgtagagatgggatttcattatgtttcacaggctggcctcaaactcttgggctcaagcaatcctctctccttggcctcccaaagtgctggaatattaatgtcttttaaaattggtttgttcaaatcagaatctgaattttgtttgaaatgtctattaagtttttaaaatctgtaactgttacccatccttttacatgccattaatttcttgaatcaactgggtctttggccctgtgcaatttttcacattctggattaggctggcagcatctttgtggtgctgttcaagatgtccttctgttcccaggatctcctgtaaactgggaattagatcagattcaggctcattctggcaagagatcctccctggaggtgctgggccacatcttgttgcatcacattgcaaaattgatggtcccatgtgtagtgacgcttaaaattaacgtgtccaggtcctgatccctctgttagaaactctgccaaccagccaggtgcacagtgactcacgcctgtaatcccagcactttggaaggccgagacgggaggatctcttgagcctaggagtgcaaaaccagcccagataacaaagtgagacactgtctctacgaaaaacttaaaaaattagccagttattgtggcacacacctgtggtcccagctacttgggaggctgaagtgggaggatcacttgagcctaggaggtcgaggctgcagtgagctgtgttcatgccactgcactccagcctgggcaacagaggaagaacgtatcaacctttcacttgccttagcagagggatcctttaaaactagatcagatggtatcactcctgttcatatcatagttaaaacaaagaccaaagtttttgccaggccaaggcttgccctcaccccaagcccaccttccctctactcctgcccccaactgttccagccacaaacaggcctcctcacagttcttcacatgcctgccacacgcctgcctctgggcctttgcactggctattccctccacctggaatgctgttccccacagggctcacttgctaatttacttcagatctcaatcatagcctgagagaagccttcccccatcatcctctctaaaacagcacccacacctctcactatcccctgctttcttttcctttttctttttttgtttttgtttgtttgtttgtttgtttgttttttgagatggagttttgctctgtcgcccaggttggagtgcaatgaagcgatcttggctcaaagcaacctcctccattggggttcaagtgattctcctgcctcagcctcccaagtagctgggattacaggtgtgtaccaccacacccagataattttgggtttttaaaattttttttttaagacggaatcctgctctgtcacccaggctgtagtgcagtggcgtgatctcggctcacttcctgcaacctctgcctactgcattcaagcaattctcctgcctcagcctcccgagtagctgggactacaggtgcgcaccaccacaccaagataatttttgtatttttagtagagacagggtttcaccatgttggccaggctggtctcaaactcgtgaccttgtgatccgcctgtctcagcctcccaaagtgctgggattacaggcgtgaaccacagtgcctgactaatttttgtatttttagtagagatgggtttcaccatgttggccaggctggtctcaagctcctgacctcaggtgatccgcccacctcggcctcccaaagtgctgggattataggcatgagccactgtgcctggcccttgctttatttttcttcactgcacatcttgcaacatgataagtatttatgtgagtgttatttctcttcccctttgaatggaaactccagtaggatgtggacttgtcttgctcattgtagaaaccccaccccagcaccacctgtccatcttttcttttcttttttttttagagatagggtctcactctgtcatccagactggaatgcattggcaccatcatagcttgttgcagcctcaaactcctgggctcaagcgatcctcctgcctcagtctccccaagtagccaagactatgtgtgcaagaacacctggctaattaaaaaaattttttggaagacacagggtctggctatgttgccaggctggtcttaaacccctagcctcaagcaaccctccaacctgggcctcctaaagtgtgggattataggtgcgacccactgcacccagccccgaatctttttctcttttttggggggggaggggggatggtctctgctgtcacccaggctggagtgcagtggcataatcctggctcactgcaacctccacctcccaggttcaagagattatcctgcctcagcctcccaagtaactgggactacaggtgcacaccaccatgcctggctaattttttttgtatttttagtagagatggggttttaaaatgttggcaaggctagtctcgcgctcctgacctcaaatgatccacccacccgggcctcccaaagtgctgggattacagatgtgagccaccaagcccggcccccgtctcattttttaaaatgcatttcaaagtaaattgcaggcacatagcaggtgctcagcaaatagttcatatagttcatgagtgaatgaattcacaggttcaagtaggccatcaaccagctgggtccactgagccctagggtgggcaggggccccccaacatatctaaacaagtgaacagatctttgcacatatttgcacccctcaaaaatgccacaataggccgagcgtggtggctcacacctgtaatcccagaactttgggaggccgaggcaggcacatcacctgaggtcaggagtttgagaccagcctggccaacatggtgaaaccccatttctactatgaatacaaaaattagccaggcattacggtagttcctgcagtcccagctactcaggaggctgaggcaggagaatctcttgtacctgggagttggagtttgcagtgagcccggattgcgccactgcactccagcctgggtgacagcgagagaccatctccccaaccaaaaagaaaaaaagagatcgggctgggtgcagtggatcacacagtgggtcacgcagtgggtcacgcctataatcccatactttaggaggcccaggtggaatgattggccaggcttacctcgtgatccactcgcctcggcctcccaaagtgctgggattacaggcttgagcagccacgtctggcccctaaaacagttttttaaaattagccaggtgtgcttgcacacatagtcttggctactcggggaggctgaggcaggagggtcacataagcccaggagtttgaggcttcagcaagctatgatggcgccactgcattccagtctggatgacagagcaagaagacagaatgcttgaactgggaagtggagtttgcagtctgctaagatacagccaccgcactccagcctgggcgacagagtgagactctgtctcaagaaaaaaaaaatgccacaataaggaattgtcccctttatggcaggccttttacagggcggtgaagatgcagcagttcccaaaatatacccagtcccttcccccgcagagcccacaggccagtgggaggagacagatgtgagacacataatcatgccaataaatatataatgacaacccaggcaaagtgttgccaaggaaagggacagcatgttgggagtgaacaatatgaggacctagattgggctgggggggccaggcagtgatgcgatggagaagggatgatagagttggggacaaagtgctgcaggaggttgctccaagtcctctgagggggctctttgggtgagaaagcgagagaagcctggggaggcgaggggagggtcacagaaacataaggagtttagggttctgctgaaaggtttggggcagaggtgggaaagggtttggtttgagattgggaagaagccttctgactgttgagtgggagacaggttggaaggagcaacagaagccagcagcccatggccgggcacagtgacccacgcctgtaatcccagccctttgggaggccgaggcgggcagatcacgagttcaggagttccagaccagcctggccaacatggtgaaaccccgtctctaccaaaaatacaaaaattaacctggcatggtggtgcacacctgtaatcccagcaactcaggaagctgaggtgggaggatcacttgaacccaggagatggaggttgcagtgagccgagatcgagccattgcactccagcctgggcaacaaagcaagactgggtctcaaaaaaaaaaaaaaaaaaaaagacacagcccagggagacaacggtgaagggccctaagtggccagtgacaaggagctgggagcttgccctgagggcagcaggaggccatgggcaagcagagaagggacagggtaggatttgactttcagaaacagtcctctggttgctaaatgggagaaaggagtgacagtagaggcaggagaaggcaggatcagacgggggtgctgggaaggggcaggtagaagagacatcaggaggccaaacagataggactttatgatgcaccgtaggtataccagtacccaaacacaggtggccaagagcagagggatagacgcccagcctcctcctcacagacatccaggcatgcagagccctccacgtgccaaacacacagggccgaggaatggaagtgcagcagagccgatacgcaggcagcagatctgcaataaccaggacacacagtcccaccagaaggagagagcagtggaatgatcagggctcactgcagcctcgatctcttggactcaagcgttcctctcactccagcctccctagtagctgggaccacaggcacacgccatgatacctggttaagttttaatttttaaacttcttgtagagatgggggtctcagtgcattgaccagtctggtctcgaactcctgggctcaagcgatcctcccaccttggcctcccaaagtgctgggattacaggagtgagttactgtgcccggccaacaactattcttattcccattttacagatggacaaactgaggctcaggaggccagtcacttgcctgtagcccacagttagtggtagcactgggattccaacttgggtccccttcatgtcgcctgtatttggtgtcccatttaggcgtccatgcaggttttggcgtgtctgaagatctgtgtctccccaagtaagtgtcccccatggatgcccacccagccgtgtcctcctgtctctgaggtttctccaggaatcgagctcctggcctggcttgtctgagtgtgtctgtgggccagtagcatgcccctgcccgtctgggtccctctgcgtgtctctgcttgtcctagcctgtgtgtgtcagtgacgtctaagagtgtgtgtgcgtgcgtgcgtgcgtgcgtgtgtgtgtgtgtgtgtgtgtccttgtccgaggagccgagagagtgagggggaatgaagggccaaggaggcctggctggggctgggctgggggtggaggcggggagaggggcgtcacggcctgagctgagaggggagtggagttctggaggaatgtttaccagacacagagcccagagggacagcgcccagagcccggatagagagacacggcctcactggctcaggacagggggcacagccaccagggtccccttccccctcctcagctccctccctggcccctttaagaaagagctgatcctctcctctcttgagttaacccctgattgtccaggtggcccctgggctctggccctggtgggcggaggcaaagggggagccaggggcggagaaagggttgcccaagtctgggagtgagggaaggaggcaggggtgctgagaaggcggctgctgggcagagccggtggcaagggcctcccctgccgctgtgccaggcaggcagtgccaaatccggggagcctggagctggggggagggccggggacagcccggccctgccccctcccccgctgggagcccaacaacttctgaggaaagtttggcacccatggcgtggcggtgccccaggatgggcagggtcccgctggcctggtgcttggcgctgtgcggctgggcgtgcatggcccccaggggtgagtgatgggggctccttggggcagggatcccctcggaggggctggggcaggggtaggaggtgggggatgatggcaggtgtggggggcctgggctggcttagggagtttccttgggaccacagaaaagggacttcaagggagggagacacagactcagagacaccaagtgcggcagagggagagaaagactgagagaggaactgaagggcaggggggacagaagagaggacccggagagacagacagacaaggagaagctgagggcaggggtgggggctggacctgagaagggggccatggggagaggggctgagctgagggtcgccaggaaggaagaaatctttccgaaggggcaccgagtcaggcagtgggatgaggagggctctggagccctgggggaaaacgcttctccctgccaacaccacccccctgacccgccacttgtccctaccccaccagtccactccatctctggggaggaggctctcactttgtctctctgtctctgcctccagctctgctatctctgtgggtctctgtttctctctctttcacagtctctgcctttatctctccctgctctctgagtctctctctctcttctcagcctccctctgtgactgtatcccccctccgcccccaccttttcttctctcttgagggctgtttcttcattttttctgtcttgccttgtatctgtgctcctctctgtctcatctcccctgcctttctctggcttctccctccgccaccacccttatctccccccaccaccacccttatctctctcccccaacccctgattcttcccctccatccaccagcaccagcgcgacctgttaagtctctagagacctaagagaggacggagggggcaggggctggccctgccaggcagtgcagggcgtgggaggctgccagatcccgagcctccttcccgacgggatggacgctagatcccagtcccttgggagggctcccgtcctcctctcagagcctccgccctccaccccactctgaggtcactctgcaactatgtcggcctaagggcctggcggggtcctggccgccggtgggcaggcaaggacagggtggaactgagggccggaaggagctggggggttcctaagctaactcttcccatctcccctccaggcacgcaggctgaagaaagtcccttcgtgggcaacccagggaatatcacaggtgcccggggactcacgggcacccttcggtgtcagctccaggttcagggagagccccccgaggtacattggcttcgggatggacagatcctggagctcgcggacagcacccagacccaggtgcccctgggtgaggatgaacaggatgactggatagtggtcagccagctcaggtgtgtggccacatccccgaatcccactcccacctccgtcacacagagggcagaaagcccacctgggtgggaaccccagtttgaccacttgtcagccgtgcggctttgagcatgtgatggaacctctaggtttcgttttcctcttctgcaaaatgagttaataataggacatacttcgtggttgtcatgagcttccagactggacaccctctttccgttctgacagaccccctcccagtgtccagctctgaccctgaacctctctgtctctcctcttgccctgtcagaatcacctccctgcagctttccgacacgggacagtaccagtgtttggtgtttctgggacatcagaccttcgtgtcccagcctggctatgttgggctggagggtgagctctggggtcaggggtcctgaggggtcagaggacatgtggcgctcataggttgtgggaagtcaggaatcctgaggggtcaaggtcaaagggtgctggaggattcaggatgaacctagcgtcatacagcctaagaatgtcagagttttgggtggtcaagaagctgggagtccatataagttatggtgccaaggctgggggattatatgttctgggtgaaaagacttcttgggggtagttggatgtcctaggcatcagacaccatcaggtcacaggaggccattctggtcttcagataaggcgtcagaggcacgcaacgtacccctgtccccacgaccccagcggtctcttttttctcatccatagaatgagatgaggatgagctgtcagacattctggaagagagacatgaggagctcagctatcgtggggggtctgacatgggaggaatcagatattggggtcacgtgtgtgttgggtatggctcaggtgccctcggggatcagataaggcaagtcaatgaccctgcagggtgggtttgctgcccaaagcctacagcatcctagtggtgagtcaggcatcttggggcctcagagggaccccagcctctaccactgcccaccccgctaggcttgccttacttcctggaggagcccgaagacaggactgtggccgccaacacccccttcaacctgagctgccaagctcagggacccccagagcccgtggacctactctggctccaggatgctgtccccctggccacggctccaggtcacggcccccagcgcagcctgcatgttccaggtgagtccggggatgtgggtcagctccgaatagggggccgggcagggctgaagtcaggagcaagggaacattgctacctctgcgtgagtgtctgactgtccttctgtccctcactgtctgtctctctcgtttctccctctgagtctgtctctgcctctctgtctctacctatcttatttctctccgtatgcctttttctgtctctttctgtctcttggtgtgtgtgtctttctgtctctctttgtatgtgtctctctctctgtctctctgcttctctctccctccattcaccccggcctctctctgaatagaattctttgtcctgggtttcctctgagctgttccatggctcgagtgcgtgtgggcctggtgcccctttgtcagcccttgacccaagcagggcaccggaatcaaccgtgccctcctctcctccgcctccctccacaaccggcccacctcctgccctaacaagcctgctggcctcagtcaaagggaggatgtccagcccggtccccactggggagatggaacccaaagaagagagagcaggaagaaagtaggagacagaggctgggcgtggtggctcacgcctgtaatcccagcactttgggaggctgaggcgggcggatcacgaggtcaggagatcaagaccatcctggctaacacggtgaaaccccatctctactaaaaatacaaaaaattagccgggcgtggtggcgggcgcctgtagtcccagctactcgggaggctgaggcaggagaatggcaggaacccgagaggcggagcttgcagtgagccgagattgcgccactgcactccagcctgggcgacagggcgagactccatctcaaaagaaaaaaaaaaaaaaagaaagtgggagacagagagagatagaatgacatacactggaagggacaggccacagtgacccaagatgaacatagacaggacagagaggccgggcatggtggctcacgcctgtaatcccagcactttgggaggctgaggcaggtggatcacttgaggctgggagttcgagaccagcctggccaacatgacaaaactccatctttaccaaaaatacaaaaattagccaggcgtggtgacgggcatctgtagtcccagctacttgggaggctgaggcaggagaatcgcttgaacccgggagatggaggttgcagtgagccgagatcacaccactgcactccagcctgggtgacagagcaagactctgtctcaaaacgaaaaacaaaacaaaatgaaagacaggacagggaagttggagtgacagaaaccctctccttcttggggaccattcccttctgcaccatgcagacgaggaaggaccgagctcagggttatgcagtggtcaggggcatcactgggggaccctggattcagggggttctccctactgaaggaggaaagacagaggagcagatggcagaggctctgtaaaggaaggaggctgcagcctggagggcatcagcttcccgcactcccaacctgctgcctctctctgctggaatgaggaggggccttctgactgggggtctccagggtggagggaggagctcacattctcagcattcctgggaccctgagttgcaaggaagacctggtgagcatgctgaccccagaggagtgactcaggcccatggctcgagtggctgagtagggaccagggttggggatcgggcatgagtcagcctggcaggtcccatgagaaggggaggggagggagagaaatgggggctgcacaggtgtgaggatctgtgcatgtctgtgtggtggtggtggggtgtctggatatctgtgtgttctggatctgagtgttagtgtatccgtcagcacaacctctgtgtgagggtgtgccttggcgagggtggacttctgtggatgtcccatgtgtggtgtgtgtgtgtgtgtgtgtgactaaatatatttccttcagcttggattctgtcccaatatgtgtttggatctttatagcatgtctctctctctacgtttcttaggggttgcccgtgtgtgggtgtctgtgtgtgtgcgcatgatggagtgtaccagtgtcagcctgtgtctgtccctcttttttgtgtttgtgtgttcacagctgggactcactgtatgaaagtaaagtgtgcctggagggtagtgggtttggggctatggtgcacacctctctgtatggaggtggtagtgtcagcccacaggtgtgcagctatgggtgtgagagtgtcctagtgagagcttgtgttcccttgcagaatcagaacgtgtccatggataacttgtgtttcttaccaccttttttcccccttattttttttcaagataagctcccgctgtgtaacccaggctggagtgcagtactgtgatcatggctcactgtagcctccacctcctgggctcaagcaatcctcctacctcagcaccctcccacccctcaagcagctgggactataggcatgtgccaccatacccagatagtttttgaattttttggtagagacagagtctcgccatgttgcccaggctgctcttgaactcctggcctcaagtgatcctcccgcctcggcctcccaaagtgttgggatttacaggcgtgagccactgctctcaaccctcagcctcttaccagctttctgtgtgtgtccatagatgtctctgtggcgtgtgtgtatatgtcacagggtaagcatgttggtgtatgactgtagtcacagacctgtgtgtgtgtgtgtgtgtgtaacagcaccctctgcttctctctggtctccctgtgtgtgcactggcccctgctgcctctgagtacatgacctaaggatgcttaccagtcagcgtatagatgtgtctctgtgtcaatctatgtgtccatggcagtgtctccatccttgtgtgtctgcatcaggcctgcgcatctacgaaactgtgtttttttgttttttggggtttttgttttgagacggagtctcactctgtcacccaagctggagtgcagtggcacgatcttggcttactgtaacttccgcctccggggttcaagggattctcctgcctcagcctcctgaggagctgcgattacaggcacgcctggcttatttttgtatttttagtaaagacagggtttcatgacaggtttgtcatgttggccaggctggtctcaaactcctgacctcaagtgatccaccggcctcggcctcccaaagtactgggattacaggcgtgagccaccgcacccagcgcaaatgtgtttttgtatcagtctgtgtctgggtgaacatgaaacctgggcgcatccagctccatcttatggcgtagatggaggcttggctgtgaggtgtacgcgtcggtgtgtctgtgtctgagcaggtcaaaatgacccttcattgtgtcctggtgtgtatctatctgtccacctcaactccatgtacgctgttacgtggtgtgtgtctctgaatatacagggacatttaagtttctgtgtgtgttggcatcagcctagatgtacattgcgtcgctaggtgtttgtaatcaatgtgtacatgtgtgactgtgtgtttatgtgtttgtcccacgttggcttgtatgcatacatgtctctttatgaatgtacatcagtgtcagcccgcgtgtatatgtgtgagtcacggtgtttttgtgtcactgtgtttgtgacatcagcccttgcatatctgtgtgccgttaacttaccaagcgctgcgtcttctgtgctaataacagcccctgtgtgtttaagtgtgattcattgtgagtgtgtgtgtgggggggtttgctgtgtgaaggaatttcgtccgtttgtgtgcgtctgtccctctatctgactcagggcgtgcccctcctccttccatccctctcattctctggaaaagctggggcggagagcaggggttgtggggggatggtcaggacatctggaaagcacatctggaatcggcctgctcctgtcgtcttgcggtaaagcaagaaccttctggaggggaaggggtcccagttcctcctgtccccttcactcaaggtgcggccgttggggcctgggaagggggatcccggctctggctccgcgcccccgaagccggccggaagcgctggggtggggaggtgcccccggtgactcacgcgggggcaggaatgctgcggtcggaacgggacccggctccagaacccacctccagccccagggcttctccggccggcggcgccagctcccgcgcgctgaccctggcggggccccacgtgccaggtggctggacccgacccaggctccccgcccccactcgggccgcccgcccgggactgtactgtttctcctccgggcggcgcgggggctgcgggcgcggggccttcagggcgcggaggctgcgggagcgggcacctgaccttgtctgggaacggccacctaggaagccgcgactgaggagctcccctaccctcccctttccggcctctgcagactttgcaccattccactccctccgctgacggagaaaaggaaactttgtgtctgcggatggagagcctcccttgccaacgcggtgggaacagaggcgtacacgcacggagcaaacacgagagacacgtacacagatactcaacacatgcacgtacacaccatccacagatacacgcagggtcacaaacataccagctcagaaacacaaacacagatgcacaagcacacgcgtaaacaacacgcagaactgcagtcgcacttacaagacttggtcccagggccgggcaccgagtggctctgcctgcgatccagcactttgggaggccgaggcgggaggatcgcttggggccagaagtttgagagcagcctgggcaacgtggtgagactctcctcttctctacaaaaaaaaattgaaaagttagccaagtgtggtggccgcctgtagtcccagctgcttgggaggatgagacaggaggatcgcttgagccctggaggtcaaggcagcagtgagccgtgattgtgccactgtactgcagcctgggagatagagcaagaacctgtctcaaaaaacaaaacgaaaaacttggtccttcttacatcctagcgcagacattgtgtgtgtgtgctgggggaggggggtgtctatgtttctacgtgtatctgtgttgggggattccccttattcaccaggatacgttctctaagagcccccacaaaagcctgaaacaatgaataatactaaaccctgtatatactacacataactttctttttccttcacaatttcgcagatagattgttttcttactatagatcttagcaacctcagtacatatatatatgattatctttttctaagtggagaattttcaccttttcacttaaaaggaagcactttaaggcttctctttggcctatccgaattgcagccatcactattttgcaccctggggccttttttttttttttttagacagagtctctctctgtcgcccaggctggagtgcagtgtggcgaccttggctcactgcaacctccgcagcccgggttctagcagttatcgtgcctcagcctcccgagtagctgggattacaggcacgcgccaccatgcccggctgatttttttgtatttttagtagagacgggggtttcactgtgttgcccaggcttgtcttaaactcctaatctcaagtgatccacccgcctcggcctcccaaagtgctgggattacagatgtgagccatagcacccggccaggcgattatttagataaataagagtttcttgaactctgcacttgagcactgcagtaccaggacagttgatctgatagctaagtgacttacagacaggtatcagatacagcactgagatgctggacaaaggggggattcacgttctaggccaaccagagtgggatggcatgaggtttcatcacagtactcagaacggcatgcaatttaaaacttaggagttatatctggaattttccattgaaatatttttagaccaagtgtaactgaaacctcaaaaagtgaaacctcggataaagggggactgatgtacgttgtatagcggtttgtgttgggtatctctgtgtgcttgcaggtctgtgtctctcgtgtttgtctctgtaattgtacgtgcttctgtgtgtgcacgctggtcataccaacaccaacaccaccacgttagggagggaaggcaatccaccttcactcgaaaacagttactcaaggccgggcacggtggctcacacctgtgatcccagcactttgggaggctgagatgggcagatcacttgaggtcaggagttcgagaccagcctggccaacatggtgaaaccctatctctactaaaaattacaaaaattagccgggcatggtggcgcgctcctgtaatcccagctactcagaaggctgaggcaggagaatggcttgaacccaggaggcagaggttgcagtgagccaagatcatgccactgcactttagcctgggcaacagagcaagactctcaaaaaacaaaagaaaaaaacagtcaagacacaatacgtgaactcccctatggaattacacatgctcatatttctacacctatgcccaggaatgctcataagtacatagctgaacacaatttcactcactcattcaacaagcatttatggcacacctattgtgtgccaggccatcctgacacagcaggggacgaaacagacacaacccctgccctcctagagctgacattctagtgggagaaactgacaatgggcaaggtacttgggtaacaggtaaagtatgttgggtgatgagaagaaccaaagaggaaaagtaaagcgggaaggggatagatttggagaggaagctccaattagctccaattttattgtattttttctttctttctttgtcttttcttttctttcttttttttttgagacagagtttcactcttgttgcccaggctggagtgcaatggcgtgatctcagctcactgcagcctctgcctcccgggttcaagctattctcctgcctcagcctcctgagtagctgggattaaaggggcctgccactatgcccagctaattttttgtatttttagtagagacgaggtttcactatgttggccaggctggtctcgaacttcggacctcaggtgatccacccacctcggcctcctaaggctgggattacgggcatgaaccaccgtgcccagcctttatttttcattttattatttttagtttttttgagacagggtctcactctgtcacccaggttggagtgcagtggtgtgatcacagctcactgcagcctccacctccccgggcacaggtagtcctcccacctcagcctcccaagtagctgggactacaggtgtgcaccaccacacccagctaatttttctcttttttgtagagatggggtctcaccacgttgcccaggctggtctctaactcctggcctcaagcgatcctcctgactcagcctcccaaagtgctgggattacagtcatgagtcactatgcctggccaagctccaatattaacagggtggccaggcctagcggactgagaggtgttgttgaggaacaaaaatgaaagaagagggtgcgagtcatgtagacatttgtggaagactgttttgagcacagggaacagtgcacagttcttggagtggaaacatgcttcatgtatgtgttccagagacactggaggccagtgtggccggagaagagcgtgtgacagggagagtgggagaggggttggtaggaggcgagcttagagatgaacagacatgtctccattgatgtacagccatgggccagtttccctaagtgtgtctagcaggtgtgtgtgctcatacttgtgtccttgtgagttagtgagggtgcctgtgtttgtgcatgtgagtgtgtgcatgtttgtgtgtctccttgtgtgtgtgtgtctgtgtatgcttttgtgtgtctatgtgtgagtatgtatatatgtgtctatgtccatatatatgagcacgtgtatttctgtgtgtgtctatatatgtgtatatgagtatgtgagtatctaggtgtacgaatctgtgtgtgtgagacacagtgtgtgtgtgtggctgtgtctgtttctgtgtctgtgtctgtgtctgtgtgtgagcatatgtgtttatatgtgtgtgtatgagtatgtgtctctggggtgtaagaatgtgtgtgtgtgcctgtgtgtgactgtgtgtgagtctgtgtgagcatgtgtgtgtatgagtatgtatctctctctggggtgtaagaatgtgtgtgtgtgtgtgtatgcgcctgtgcctgtgtgtgtgtctgagcatatgtgtctatgtgtgtgtatgagtgtgtgtctctatctggggtgtaagagtgagtgtgcctgtgactgtgtgtggttgtgtgtcttcatgtgtgtttgtgtatgtgtgtttttgtgtgtgtatgcctgtgcctgtgtgtggctgtgtgtctttgtgtgtgtctgtgtctgtgtgtctgtgtgtatgagtgtgtgtgcctgtgcctgtgtgtggctgtgtgtgtctttgtgtgtttctgtgtgagtatgtgtgtctatgtgtgtgtatgagtgtgtctgtctctggggtgtaagaatgtgtgtgtgagacagtgtgtgtgcctgtgcctgtgcctgtgtgtgtctgtgtgtgtctgtactatgtgtgtctgtgtggcgggaggttagggctgaaaccaagccatccttgtgtttggggatggaggctgtgttcctaactcattgccctcaactctgctaaccctcccttcaggcaagtgcctgtgtgggctgcactgcccctggtcaggcaggccatggtaggagtggcccggcatggccccggagcccttcctgcccctctctgatattggacccttccctcatatgactccctagggctgaacaagacatcctctttctcctgcgaagcccataacgccaagggggtcaccacatcccgcacagccaccatcacaggtgacagagttgggaggtggggagctgggcgtcagagggtggggtttgggtccggggtcagagtgggggcagagagcagggtagggagctttgagcaaaggctccccagggtcaatctctcccgtttgtccacagtgctcccccagcagccccgtaacctccacctggtctcccgccaacccacggagctggaggtggcttggactccaggcctgagcggcatctaccccctgacccactgcaccctgcaggtgagactcccaaacttggttcatttcagtctcaggcctccttccacccacatccacaacccccatcctctccctgggaacccaccacttctcggccactgttgagaagcagtagagcctggggggttaagccagatgtcctgggttcgaatcctagctccaccaccttctggctgtgtgaccttgggtaggtggcttaatctgtccggggctcagctctcttgtctacaaaatggacataatggtagtgcctacctggtatgcttagtgtgaaaattcaatgagtgaatgcaaattaccaacttaaaatggtatatagaacataggaaacaaatttaacaaaattggccaggcgcggtggctcacacctgtaatcccagcactttgggaggccgaggtgggcggatcacttgaggtcaggagttcgagaccagcctggccaacatagtgaaaccacatttctactaaaaatacaaaaattaactgggcctggtgggacgcacttgtagtcccagctactggggaggctgaggcaggagaattgcttgaacctgggaggcggaggttgcagtgagccaagatcgtgccactgctctccagcctgggtgacagagcgagactctgtctcaaaaaaaaaaaagaaacaacaacaaaaaaaatttaacaaaatgaaaatgatcagctgttttaattattttcagtattagtgatgttaactctagccagagtgggagccctgagacagcagagtctggagccatttctgtcaccactggatacccagaaccctccacttctcccatcccagccctggccactctgtgtggtcactgtctggggatgggtctgtcccctactggaatgtgagctctgacagggcagggctggagctgtcccagtcaccactggctcctcattcttgcccagcacaggaccagacatagagtagggaatattcgctagaaggatatattacaacccagatgagctagacccagcctctgccctcaagttgctcctagaataagaaaaccaaaaccaggccaggtgtggtggcttacacctgtaaccccagcactttgggaggccaaggctggtggatcacctgaggtcaggagttcgagaccagcctggctaacatggtgaaaccccatttctactaaaaatacaaaaaattagccgggtgtggtggcacacacctgtaatcccagctactcaggaggctgaggcaggagaatcccttgaaccctggaggcagaggttgcagtgagccgagatcgtgccattgcactccagcttgggtaacacgagcgaacttccgtctcaagaaaaaaaaaaaaagaaagaaagaaagaagaaaaccaaaaccaaaacaaaactcacagatctgtaaatataaggcctaattctggtctgaagttctctgagattagaaagttggagatggggggtggacagtgcctatgatggtagatgacagtaatgaagaatgaccaatttctactgagtgtccgctgtgcaccgggtcttgcattaacgcacacctgctcgtgtgtttgtgaaggagggtctatggatacacccattttccagatgaagaaactaaggctcagagtggttaaccagattgtccaaggtcacatcaaacccatgtcatgctcctaacctccttagaaactgttttttgttttttcttttcttttttttttgagacagagtctcgctctgttacccagactggagtgctgtggcgtgatcacggcttattgcaacctccgcctcctaggttcaagcaattctcttgcctcagcctcctgagtagctggtattacaggcgcccaccaccacgcccagctaatttttgtatttttagtagagacagggtttcaccatgttggtcaggctggtctcgaactcttgacctcaagtgacccgcccacctcggcctcccaaagtgctgggattacaggcgtgaggcaccgcgctgggccctgagaaaatgtttagagtcagtgcttgattaaacaggaattgtcttatacttacatgctctgagcacaaccccatctgcttgtcgttttaaacctagaaaatagtggctattggctgggcatgatagctcacgcctgtaatcccagcacttcggggggctgaggcaggtctgtacaaaaaattcaaaaaaattagctcagtgtggtggcacacacctgtagtcccagatactcgggaggctgaagtgggacaatcacctgagcctggcagtcaaggctacagtgaggcaggattgaacctctgctctccagcttgggtgacagagtaagactctgtctgagaaaaaaaaaaacaaaaaacagtggctattaatcttcccgttttcaaggtgaggaactgaggcccagagaggggccccctctctgggcctcagttcctcccatcctcctcccctccccggggctagaaagccgaagctgagattcaatcccagaggccagctggatttgggagacctcaaatgccaggtcaggcataagttgcactctacccacatcaccaagtgtccccaggaaagcagaagtgtgtcctcttccctttccaggtctcacttcctgctgcacatgggctagggctgaagagttccagtgggagggtcacagccgtcccagggaaaagagaagtgggagcaggcatggggagaccaactgtctgtacccatctcctctctgtcctggtagaggttcctcttcctgtctgtcactgcaggtcagagagcaggcatggtgacagcctcaccccctcctcgtacccaccatctgcccccactcctccccaggtctcatggtggtgtcatctccctccatgggggctgtgtgactttgggcaagttgctgaacctctctgggccttggcttccctgtctgtaaaatggggatgagaaaagaaattgaccccatagggtggtagtgcgaagtcaatgagttcatccagtaatgtgcttgacagagagcttggtacatatttggcactcaagaaatatttgctaggccgggtgccatggctcacacctgtaatactagacctttgggaggccgaggcaggtggatcgcttgagcccaggagtttgagacctgcctggccaacatggtgaaacgccatctctccaaataattaaaaaattaggtggggctgtcattacaccactgcactccagcttgtgtgacagagtgagaccctgcctaaaaaaaagaaaaaagaaaaagaaagaaagaaagaaaacaaacgttagctgttgataattataatgtgcaaagcagtttatatgcatcatgtcattaaaccttataccctgacaagtaagaactgtgatgcccattttccagagacagaaactgagactcagagaagttaagacactcactctaggtcacacagcaaacaacatccaacacaggacttagatccaaggaatctggctttagagcccacaccctgtggcagtaaactccttcctgacatactgtgtggctgtatggctggagtctccagggtgaaggggaagcccttggctgcaccattcctgaggcgtggctgtgaattgtgtggttatgggggttttgtggttccatgtggcagggctatacagatgtgtacaccagtggtggccccctccactctgagtgtgccattcctcgggtggaataggtatgggaacctgtgccgctatgcagagcttgacacttgttgccaggaaacacacataaaataataagtgacaggccgggcacggtggctcgtgcctgtgatcccagcactttgggaggctgagcgggcagatcacctgaggtagggagtttgagaccagcctgaccaacatggagtaaccctgtctctactaaaaatacagaattagccgggtgtggtggtgcatgcctgtaatcctagctactcaggaggttgaggcaagagaatcacttgaacctgggaggcggaggttgcagtgagccgagatcatgccattgtactccagcctgggcaacaagagcgaaactccatctcaaataaataaataaataaatagatagatagatagatagatagatagatagatagatagataataaatgacagtatgcacaagcagtcttctaaatgcttacatgccccaattcagtcaaccctgtgaagtggggagccactgtcatcccattttacaggtgagaagactgaggcacacagctagggaatgatagagcctggatttgagccccagatccagcatccgtgctcctcagcactaggctaaactgcctctgtgcacagacaagaggtattgttaccattactgatattcttaccgccagtagagcaaagactctggggacaggatggggtttaggtcccagcttcatcagtgacaaactgatgaccttgaacaagtgattccgtctctctgggcctcagtgttgtcatctgtacagtgggaataagcataatgcttaccacaggacaacaggattgatgtgagggccaaatgaattcagatttgtcaagggctaagaaaggcactcagtacatgttggacgtgttttatctttttttattaagataatatataacatagtcaggtgaggtggctcacgcctgtaatcccagcactttgggaggccgaggcaggtggattacctgaggtcaggagtttgagaccagcctgggcaacatggtgaaaccctttctctacacagaataaaaaaaaagccgggtgtggtagctcacacctgtaatcccagcactttgggaggccgaggggggcggatcacttgagatcaggagttcaagaccagcctgaccaacatgatgaaacctcgtctctactaaaaatacaaaaaagttagccaggcatggtggcacatgactgtagccccagctactcgagaggctgaagcagaagaattacttgagcccaggaggcggaggttgcagtgagccgagattgtaccactgcactccaacctgagtgacagagcaagactctgtctaaaaaaaaaaaaaaaaaaaaattagtcaagcatggttgctcacgcctgtaatcccatctacttgggaggccgaggcatgagaattgcctgaacctgggaggcggagattgcagtgagccgaaatcacgccactgcactccagctcaggtgatgaaatgagactcataggccgggcacggtggctcacacctgtaatcccagcactttgagaggctgaggcgggcggattgcctgaggtcaagagtttgagaccagcctgactaacatggtgaaacgctgtctctactgaaaatacggcaattagtcgggcgtggtggtacgcgtagtcccagctacttgggaggctgaggcagaagaattgcttgaacctaggagacggaggttgcagtgagccaagatctcaccactgcactatagcctgggcgacagagcaagactccctctccaaaaaaaggaaaaaaaaaaaaaaagaaaaagaaatgagatgtataacatgcataatcttcagtgtacctctagatcaagctcgtctaacacatgtggcccaggatggctttgaatgcggcccaacataagttcgtaaactttcttaaaacattatgagatttgtttgtgatttttttttttaacgcatcagctatcgttagtgttagcgtattttatgtgtggcccaagacaattcttcttccactgtggtccaagaaagtcaaaagattggacacctttgagattgtttaacacacatattcaccatgtaaccaccatccaaatcaagacacagacccttccagtccccaagaagtctccctcaggccccagagatggccacccttctgcttctagaacattgcttttgcctgtagtataatgtcatataaatggggcctcacagtatcgtgctattattatgatgatcattactattatttgagacagagtcttgctctgttacccaggctggagtgcagtggtgtgatcttagctcactgtaacctctgcctcccaggttcaagtggttctcctatcgcagcctcccgagtagctgggattacaggcgagcgccaccacatccagctaattttttacatttttggaagagatggggtttcaccacgttggccaggctggtcttgaactcctaacctcaagtgatcgcccaccttggcctcccaaagtgctgggattacaggcgggagccaccgtgcccagtctatttgcgttattattgtcatcacactattattatcggtgctgaccacccgccatgcactgtggcatcctttgggcataactacacttaatctttaaacaatcctgtaaggcacttgatcctctaaggccccgtgtgcccaaggaaaaaactgaggctcagagagggaagagtcttgccagaggtggcttttggaagtggtgacagaaccacattgtatacagccaaatgatctccttgctttgcaaatccaggtgcccgtgttatcctagcatggcactgcaacacacacgcacccttgaaaagttgtgtagtcacaccagaccaccaccactgggagctgtgtgaccatctcgtgtgattgcttggctgtcccgtcctcacacccttgcctctcctcaggctgtgctgtcagacgatgggatgggcatccaggcgggagaaccagaccccccagaggagcccctcacctcgcaagcatccgtgcccccccatcagcttcggctaggcagcctccatcctcacaccccttatcacatccgcgtggcatgcaccagcagccagggcccctcatcctggacccactggcttcctgtggagacgccggagggaggtaagaagggttggggagggacacgtcaccactgccccaccggaccttgcttatatcagtgccacccccattgtcccctttcactcctttacccctcatggcctcaatctccttcccatccaatctctgacccctcagcagcactgcccgctggcctctctcccagcccttctctcccctgtgcttcctctcatgggaggcctgcacgagttgcccacgtgtgtgcccttggcaccctgcacccacttcctgggaacaggggagggggtcaggaagaggtgggggtgccagcttcccctcttccctgtcctccagtgcccctgggcccccctgagaacattagtgctacgcggaatgggagccaggccttcgtgcattggcaagagccccgggcgcccctgcagggtaccctgttagggtaccggctggcgtatcaaggccaggacaccccagaggtgggtgctgctggtgggattggagtggagtggcttggggaggagggaggagaacatatcagggcagacatagatggttgtgaaggttgggtagtacacaattgctctatgcctagggggcacattcagggaaggttcacattcacattctggggagaataagggggtctaagggagggcatggggaatggctgtttttgaaccactgcaaaagcatttcagcagactcatatttactatataacgattttacagcagatagttatatagcaccttggggaaggggtaccttttcctgattttcacaaaggcactcctatcagggctagcaataccctgacatagggagggaggatggaaagggaagctagaaggggatggagggatacaggttaaaggatgaggatgagagatgaaggggaggacgaggaaggatgaggagttggaggatggggagagcgttttgagaaagagatggggcattgagcccgagagtgaaggcttaacagctggggggtaaggttctaccctgatgccacttctggacctcctaggtgctaatggacatagggctaaggcaagaggtgaccctggagctgcagggggacgggtctgtgtccaatctgacagtgtgtgtggcagcctacactgctgctggggatggaccctggagcctcccagtacccctggaggcctggcgcccaggtaagtccaaagccatgcccaacctgcttcaaccctgtctctccctgacagccctgacttactccttgtacctttcagtgttaccgcaacttaggccctgttcctaccctgagccttactgagagctgccctcactcccttacccatgccaacccctcactcccttacctgtgccacggcctcactcctttacccgtgccacaccctcactcccttacccgtgccacaccctcactcccttacccgtgccaaaccttcactcccttactcgtgccacaccctcactcccttacccgtgccacacccttactcccttacccgtgccacgccagtcttgtcctctctgagcacatctcctctctgtcctttcttctcacagggcaagcacagccagtccaccagctgggtaagggcttccacaccccatctcctccttccctaccctcaacacctagtgggggcactgtcaccatgcatactcattgcacatccctttcatgtttctctaactcatcactctaacctacttcttgagtttgtgtggtccttgatggaggtgcctataatggcctagcatagcacattgtaggtattcaggcaatgacagatgagtgggtggatggatgaacaaatagatggatggatggatggatagatatatggagggtggatgggtgggtgggtcaatggatgaatagaggatggataggcgggtgaacagataaatgactggatgtcgagtggataaatggatgggtagatggatgggtggatggatggatgggtggatatatggagaatggatgggtgtgtgggccaatggatgaatagagggtggataggtgggtgaacagataaatgactggatggtgagtggataaatggatgggtagatggatgggtggatggatgggtgggtggatatatggagggtggatggatggatggttggatatatggagggtggatgggtgggtgggtcaatggattaatagatgggtggataggtggatgaacaaaagatgactgggtggtgagtggatatatggatgggtagatgggtggatggatggatggatggatggatgaatggatggttggataaatggatggatggacagatggatggatttgtgagtggatgaatggatgggtagaaaggtggatggatggatgaatgaggtatcctcctcacatccatccctctcaaatatttctctaacaattctcaaacattcctcctacacccattgtcccctctgggcactattatggttcactcttgtaactcaacccactagccttcaatactcctcacatcccttcctacatttcttcacatacgctttccacgcttattccaccctcctttcacatatatcccattataatccgttcctcccacatgaccccaaaggcccattgcacaacacacttctcattcacaaactctgcacaccttgtatgcacttaccataccttccacattgcaaacactgaaaaacattgtccacaactttcccacacccgattctccttgcatgcttactgcacactccatagacatcattccctcacccttcactaatcccaacccatctcactctgcacactcaccctgaaccccttgcatactcagcacataatgatctttatttcttacacactccattccacccctgccctttttacaccccctttctgtgcaccccatacttctcatctgcccttctaacatcttttgcatgctcactgcacacttctctcacactgcaattacatccttaaaattccttgctcactccttgtatctaagacttcacgaatactcttcccacttcacacacccccaacttttccagcagccatccaaccctgtatatgcttaccatgcccctttggatatttatttcaccctcattcctggctttatggaaaccattgtggccgggtgcaatggctcacgcctgtaatcccagtactttgggaggcctgagacaggtggatcacctgaggtcaggagttcaagaccagcctggccaacattggcgaaaacccatctctactaaaaatacaaaaattagctgggcctggtggtgcgagcctgtaatcccagctgctcgggaggctgaggcacaagaattgcttgaacctgggaggcggaggttacagtgagccaagatcatgccactatactccagcctgggcaacacagcaagactctgtctcaaaaaaaaaaaaaaaagaaagaaagaaagaaaaaaagaaagaaaagaaaaagaaaagaaaaaaaaattagccaggtggcacagacctgcagtcccagctactcaggagacatggtgaaaccctgtctctaccaaaaaaagaatacaaaaattagctgggcatggtggtgcacacctgtaatcccagctacttagaagctgaggcaggagatttgcttgaaactgggaggcagaggttgcaatgagctgagaccgggccactgcactccagcctgggtgaaagagtgagaccctgtctcaaaaaacaaacaaacaaaaaaagagacaaagaaaacccttttgtagtcattgcattctcttcaaaagatgttccttagtccgccctccttgcacacgcttcatgcaccatcctacactgcaaggatcttcttccccactcacctgcttatctacactctagtccacccttcttgcacaatcatcacatttctcacactaacctatgctgcttgagatttctccacacccatctcatgttcatctagccctcttggcacactcataacgcgttccacacatctctccctcccattccacactcactgcacactcctcaaatatccattccactcttctgtttttttggatcttggtggcataatatttggtagcttaaagtaaggaaaactgcaaacgcccaaacagagacttgaaccctgaaccctcaggttaaaagtctgatgctctaccacctgaactatcctggcactctcttttttttttttttttttttttttttgagatggagtcttgctctgtcacccaggatggagtgcagtggcccagtctcggctcactgaaacctccacctcccaggttcaagcaattctcctgcctcagctcccgagtagctgggattgcaggtgtgcaccaccaccccagctaatttttgtatatattttgtttaagtagagacagggtttcatcatgtcggccgggctggtcttgaactccttgcctcaagtaacccacccgccttggcctcccaaagtgctgggataacaggcatgagccaccacacctggcctccatcccactcttaactcacccatcctacaactttcacacacttctgctttaacctgcacttgtatcacatccattgcatgccctgtccagcccagcccattcagatatgtgaatgcatccatcacacacctcatcaagtatgtgcacatctttgccgaggccttctgcctccctcccacatcacccctttgggtcccagagagctggatccaaggcttcatccatgacctgttcctcataccccctgatagtgaaggaaccttcaactcctgccttctcgtggccctggtggtatgtactgctaggagcagtcgtggccgctgcctgtgtcctcatcttggctctcttccttgtccaccggcgaaagaaggagacccgttatgggtgagttggaaccacatggggaggctgtgtggcctgggatggagaggctggaggcagggaggccagtgaggaggctggtgcaggaggagtgatgactaagaatcagaatgagggcaagggaagccaggcgtggtggctcacgcctgtaatcccagcactttgggaggctgaagcaggtggatcacttgaggtcaggagtttgagaccagcctggccaacatggcgaaaccctgtctctactgaaaaatgcaaaaattagcgggaagtgtaggcacacgcctgtggtcccagctacttgggaggctgaggcacgataatcacttgaacccgggagatggaggctacagtgagctgagatcgcatcactgcactccagcctgggtgacagagtgagatcctgttttcaaaaaaaagaatgagggcaagggggtgtgtggaatgaatggaaggcagaaggtagctgcccaaggcatgctcagcaaatgttagcacagagggcaggcagggcttgaggctgagatggtgcttgctcaactgctggttgagtagggggttccacatggtttttccctgccctcacctactccccctcccccccagagaagtgtttgaaccaacagtggaaagaggtgaactggtagtcaggtaccgcgtgcgcaagtcctacagtcgtcggaccactgaagctacctgtaagtgaaccctatgccccactgccctggcctggatctaaaggctgtagagaatctggcctgctgggcttctgtacatgtgtgagccaaaagtttctaaaggccttgggatactagaatgtcagaaccacagaccctagaaataacagatttgtggaaccacaaagaactttcaaggaatagaatcttagacacagtaaatcttagaaacaccaaggctgggtgtggtggctcatgcctgtaatcctagcgcttcggggggccgaggtgggaggatcacttgagcccaggagttcgagaacagcctgggcagcatggtgaaaccctgtctctacaaaaaaaaaaaattagccaggtatggtggtgtgcccctgtactccctgctactcgggaggctgaggtaggaggatcacctgagcccagggaggtcaaggctgcagtaagccgtgatcacaccactgcactccagcctgggtgacagagcaagaccctgtctcaaaaaagaaaaaaaaataaaagaaagaaaagaaacaccaaacctcagagccattggatcttagaagatgtaatgatgatgataatgatgaagataatgacaagaagaaaatgatgatgatgatgaaataatgttgagattagatggtgatgatgtgataaaaatcacaggcaaccctagcactacctatgtggcaggctctgttctaagcattctacatgtatctcctcgtttaaccctcagagcaacccaaggacacgggtttcttttttctttttttttctttttttttttgagacagagtctcgctctgttgcccaggctggagcacagtggcacaatctcagctcactgcaaccttcacctcccaggttcaagtgattcttatgcctcggcctcccgaatagctgggattacaagtgcatggcaccacatctggctaatttttgcatttttagtaaagatggggttttactaaccctgtctttgttagccaggctggtcttggaactcctggcctcaagtgatcaacctgccttggcctcccaaagtgctgggataacaggcgtgagccaccacgcccagccagaggtgggtttcttatcaccttcacttcacagatgaggaagctgtggcatagagtggttaagtcacttgcccaaggccacacagcttgtaaattggatagctgggatttgaacccaggtacttttgctctgaagtctatactattttttttttttttttgatagaatcttgctctgtcacccaggatggagtgcagtggcttgatcttggctcactgcaacctccgcctcctggattcaagcgactctcctgcttcagcctctcaagtagctgggactacaggcacatgccacaacgcctggctaatttttgtagttttaatagagacaaggtttcaccatattggccaggctggtctcgacctcctgaacccgtgcctcccaaagtgctgggattacaggtgtgagccaccacgcctggcctgaagtctatactctgaactgccacactctactacctcttggaattataaattggtagagagatagaatcgatcttggcctgaaaaattatatgcatgtactctacacccttatacttttgaaatcataaaatcttagaactatagactctccattagaaggctggaaagccatgcaaggtctcagccgaggaggggatctcagaggcccagtcaaatctgttctttcggctgggtgcagtggctcacgcctgtaatctcaacactttgggaggcccaggcgggcagacacttgaggtcaggagttcgagaccagcctggccaacatggcgagaccctgtctctactaaaaatacaaaaattagccagatgtaatctgtaatcccagctacttgggaggctgaggcaggagaatctcttgaacctgggaggcggaggttgcagtgagccgagatcgtgccactgcacttcagcctgggtgatagagcaagacaccgtctcaaaaaaaaaaaaaaaaaaaaggaatctcatctttccagttagggaaactgaaatccagaaagaaaatggaagagctaggtctcttcctagcatacagcgagaaagccgccagggccccagggggatgtttggaaagggctgggaaagacatttatttaagaagagaaggaagaagcaacgatgtcccagtgatttaactgagtaacatacagcatccattctcagggtgtgagcctggtcccctgtggtccctgagacctttgcagggggcccataaggtcaaatctattttcatactattaccaagacattatttgcccttttgctttctcattctctcattagcattcagcgcagttttccagaggctccctgacgtgggatgatgtcatccaacactctgacagctgatggaccttgtgcttgtatattcttgttttaaaaatttatcaggctgggcatagtggcacatgcctgtaatcccaccactttgggaggccaaggtgggcaaattgcttgaggtcaggagtttgagaccagcctgaccaacatggtgaaaccccatttctactaaaatacaaaaattagctgggtgtggtggtgcatgcctgtaatcctagctacttgggaggctgaggaaagagaatcgcttgaacccgggaggcggatgttgcagcaagctgaggttgtaccactggacttcagcctgggcaacagagtgagactgtctcaaaaaaaaaaaaaattaaataaacctgataggttttcttttgaggccaggagtttgaaaccagtgtgggcaacatggcaaaaccccatctctatttaaaaaaaaaaaaagaaacacaaaaatttgccaggtgtggtggtgtacacctataattccagctgctcaggagggtgaggcaggggaatcacttgaacctgggaggcggaagttgcagtgagctgagattatgctactgcactctagcctaggcaacagagcgagactcggtttcaaaaaaaatttttttatttttttagagatggggtctggctatgttgcccaggctgatctccaactccaggcctcaactggtcctccttccttggcctcccaagttgctgggtgaaccactgtgaaccactgtgcccagctagttttatttttgaatacagaaatattgatatatatgtaacataaacaaaagctctttctagtcctcaataattctaacaatgtaaaggtgtcctgatgtcaatttgtttgagaatgattatataacaaagaaaatggataaattacaattacactcaacaactaaattaaaactatttcatagacatcatgttgagtgaaagaagccagacacaaaagagaatatactatgtgattccatttttataatatttcaaaactaatcgattgtaacagaaatcaagaaagtggctaccccaggagggcaggtcatgttctgttcttggcctgagtgctagttacacatttgtgtttgatttgtgaaaatccactgagttggccaggcgtggtggctcacgcttgtaatcccaacactttgggaggccaaggtgggcagatcacctgaggtcgggagttccagaccagcctgaccaacatggagaaaccccgtctctactaaaaatacaaaattagctgggcgtagtggcacatgcctgtacttgggaggctgaggcaggagaatcgcttgaacctgagaggcggaggttgcggtgagccgagattgcgccatcgcactccagcctgggcaacaggaacgaaactccatctcaaaaaaaaaaagaaaagaaaatccactgagttgcttacttatgatttgtgcagattatacttcaataaaaagaaatatttttgtgtgtgtgttttgtttgagatggggtcttgctctgtcacccaggctggggtgcagtggcatgagctcagcttactgcagcctccacccctgggctcaagtgatcctccaacctcagcctcctgagtagctgggactataggcgcgtaccaccacacatggctagcttttgtatttttttgtagagacggggattcgccatgttgcccaggctggttttgaattcctggactcaagtgatccaccggcctctgcctcccaaagtgctgcgattacaggcatgagccactgcatccagcaaaaagaaatatttttattttattttattttattttattttattttattttatttttgagacggagtcttgccctgtcacccaggctggagtgaagtggtgcgatctcagctcattgcaacctctgtctcttgggttcaagtgattttcctgcctcagcctccccagtagctgggactacaggcatgtgccaccacacacggctaatttttgtatttttttgtagagacagagattcgccatgttgcccaggctggtcttgaactcctggactcaagtgatccacctgcctctgcctcccagagtgctgggattacaggcgtaagccactgtgcccagcaaaagaaatatttttaacaactggtacagcagggcactgacccatcagggtgcccactggagcaagagcgtggccaggctttaccccttgagttccctttgagggaaggttcagggggtccagaggaggagctggggtggaagtagaggggtgctcagggcagttgctaattttaaatcagtgcagaagtatgtcagtgtttcaacaatggatctatccctactggtgggtgaatgtcacctgaatgtcagccctgctccatgactctgtccaccccaaccttgcatgcagtgaacagcctgggcatcagtgaagagctgaaggagaagctgcgggatgtgatggtggaccggcacaaggtggccctggggaagactctgggagagggtgagtcccccggcagcatacacacatccttctgaacttctgagatcctgcacttccacactcccacccaactataggaaatacagtccccacgggccctctgaggtcagtgtctccctctggccccccacaggagagtttggagctgtgatggaaggccagctcaaccaggacgactccatcctcaaggtggctgtgaagacgatgaagagtgagttacgtgcacatgtgtaggacccccagctccttccctatgcccctgagacagaagagagcaagcaagttagccatagcttagaacttctggtgtttccagataggcaatggagcccctgccaggtacctcaatagaaggaattgaatatggggagattagtacaaaggtgggagacgggttgaaggaacaactgggggcagggagggaaaccagagatgagcagcagcaggaagtcacttcccccgctaggcctgaagggtagagggagcaagtggtgttaccagaatccacagctagggacaccaggcaggagctggtatcacagagttagaggctgctctgtgggagctaaaaacccagaatagcactttgggaggccgaggcagcagatcgcttgagtccaggagtttgagaccagcctaggcaatatggtgaaaccacatgtctatgaaaaaaaaaataataatagtaacaaaaaattagctgggcatggtggcacacgcctgtagtcccagctacttgggacactgaggtgggagaatcacttgagtctgtgcggcagaggttgcagtcagctatgatcatgccactgcactccaatctgggtgaca
